(19) United States
(12) Patent Application Publication
(10) Pub. No.: US 2025/0325702 A1
(43) Pub. Date: Oct. 23, 2025

(54) COMPOSITIONS AND METHODS FOR EDITING A TRANSTHYRETIN GENE

(71) Applicant: Beam Therapeutics Inc., Cambridge, MA (US)

(72) Inventors: Genesis Lung, Cambridge, MA (US); Lo-I Cheng, Cambridge, MA (US); Tanggis Bohnuud, Cambridge, MA (US); Cory D. Sago, Cambridge, MA (US)

(73) Assignee: Beam Therapeutics Inc., Cambridge, MA (US)

(21) Appl. No.: 19/209,589

(22) Filed: May 15, 2025

Related U.S. Application Data
(63) Continuation of application No. PCT/US2023/080721, filed on Nov. 21, 2023.
(60) Provisional application No. 63/385,004, filed on Nov. 25, 2022.

(51) Int. Cl. A61K 48/00; A61K 9/1271; A61K 9/51; A61P 3/00; C12N 9/22; C12N 15/11; C12N 15/78; C12N 15/88

(52) U.S. Cl. CPC A61K 48/005; A61K 9/1271; A61K 9/5123; A61K 48/0075; A61P 3/00; C12N 9/226; C12N 15/111; C12N 15/78; C12N 15/88; C07K 2319/80; C12N 2310/20; C12N 2310/315; C12N 2310/321; C12Y 305/04004

(57) ABSTRACT

Compositions for gene modification related to base editor systems, and methods of using the same to treat or prevent conditions associated with the extracellular deposition in various tissues of amyloid fibrils formed by the aggregation of misfolded transthyretin (TTR) proteins. Such conditions include, but are not limited to, polyneuropathy due to hereditary transthyretin amyloidosis (hATTR-PN) and hereditary cardiomyopathy due to transthyretin amyloidosis (hATTR-CM), both associated with autosomal dominant mutations of the TTR gene, and an age-related cardiomyopathy associated with wild-type TTR proteins (ATTRwt), also known as senile cardiac amyloidosis.

### CROSS REFERENCE TO RELATED APPLICATIONS

[0001] This application is a continuation under 35 U.S.C. § 111 (a) of PCT International Patent Application No. PCT/US2023/080721, filed Nov. 21, 2023, designating the United States and published in English, which claims priority to and the benefit of U.S. Provisional Application No. 63/385,004, filed Nov. 25, 2022, the entire contents of each of which are incorporated by reference herein.

### SEQUENCE LISTING

[0002] This application contains a Sequence Listing which has been submitted electronically in XML format and is hereby incorporated by reference in its entirety. The Sequence Listing XML file, created on Nov. 21, 2023, is named 180802-049303US_SL.xml and is 1,593,694 bytes in size.

### BACKGROUND

[0003] Amyloidosis is a condition characterized by the buildup of abnormal deposits of amyloid protein in the body's organs and tissues. These protein deposits can occur in the peripheral nervous system, which is made up of nerves connecting the brain and spinal cord to muscles and sensory cells that detect sensations such as touch, pain, heat, and sound. Protein deposits in these nerves can result in a loss of sensation in the extremities (peripheral neuropathy). The autonomic nervous system, which controls involuntary body functions, such as blood pressure, heart rate, and digestion, can also be affected by amyloidosis. In some cases, the brain and spinal cord (central nervous system) are affected. Mutations in the transthyretin (TTR) gene can cause transthyretin amyloidosis. Furthermore, patients expressing wild-type TTR may also develop amyloidosis. Liver transplant remains the gold standard for treating transthyretin amyloidosis. However, there are a limited number of organ donors, and patients may wait years for an available organ. Accordingly, there is a need for compositions and methods for treating amyloidosis.

### SUMMARY

[0004] Provided herein are compositions for gene modification or editing and methods of using the same to treat or prevent conditions associated with the extracellular deposition in various tissues of amyloid fibrils formed by the aggregation of misfolded transthyretin (TTR) proteins. Such conditions include, but are not limited to, polyneuropathy due to hereditary transthyretin amyloidosis (hATTR-PN) and hereditary cardiomyopathy due to transthyretin amyloidosis (hATTR-CM), both associated with autosomal dominant mutations of the TTR gene, and an age-related cardiomyopathy associated with wild-type TTR proteins (ATTRwt), also known as senile cardiac amyloidosis. Compositions and methods directed to editing the TTR gene using an editing system, such as one comprising a base editor and guide RNAs are disclosed.

[0005] In one aspect, the disclosure features a lipid nanoparticle (LNP) containing a guide polynucleotide containing a sequence selected from any one or more of the following SEQ ID NOs: 472-476, 479-497, 499-504, 506-532, 534-571, 573-638, 653-677, 707-711, 713-731, 733-784, 1044, 1045, 1214, and 1215, and/or any sequence provided in the sequence listing submitted herewith. The guide polynucleotide does not contain the sequence GCCAUCCUGCCAAGAAUGAG (SEQ ID NO: 472). The lipid nanoparticle contains an amino lipid according to any one of the following Formulas:

[0006] A) an amino lipid of Formula (Ia):

[chemical structure]

[0007] where:
[0008] R¹ is C₉-C₂₀ alkyl or C₉-C₂₀ alkenyl with 1-3 units of unsaturation;
[0009] X¹ and X² are each independently absent or selected from —O—, —NR₂— and

[chemical structure]

where each R² is independently hydrogen or C₁-C₆ alkyl;
[0010] each a is independently an integer between 1 and 6;
[0011] X³ and X⁴ are each independently absent or selected from one or more of: 4- to 8-membered heterocyclyl optionally substituted with 1 or 2 C₁-C₆ alkyl groups, 5- to 6-membered heteroaryl optionally substituted with 1 or 2 C₁-C₆ alkyl groups, 5- to 6-membered aryl optionally substituted with 1 or 2 C₁-C₆ alkyl groups, 4- to 7-membered cycloalkyl optionally substituted with 1 or 2 C₁-C₆ alkyl groups, —O— and —NR³—, where each R³ is a independently a hydrogen atom or C₁-C₆ alkyl and where X¹-X²-X³-X⁴ does not contain any oxygen-oxygen, oxygen-nitrogen or nitrogen-nitrogen bonds;
[0012] X⁵ is —(CH₂)_{b}—, where b is an integer between 0 and 6;
[0013] X⁶ is hydrogen, C₁-C₆ alkyl, 5- to 6-membered heteroaryl optionally substituted with 1 or 2 C₁-C₆ alkyl groups, or —NR⁴R⁵, where R⁴ and R⁵ are each independently hydrogen or C₁-C₆ alkyl; or alternatively R⁴ and R⁵ join together with the nitrogen to which they are bound to form a 4- to 7-membered heterocyclyl optionally substituted with 1 or 2 C₁-C₆ alkyl groups, where the heterocyclyl optionally includes an additional heteroatom selected from oxygen, sulfur, and nitrogen;
[0014] each X⁷ is independently hydrogen, hydroxyl or —NR⁶R⁷, where R⁶ and R⁷ are each independently hydrogen or C₁-C₆ alkyl; or alternatively R⁶ and R⁷ join together with the nitrogen to which they are bound to form a 4- to 7-membered heterocyclyl optionally substituted with 1 or 2 C₁-C₆ alkyl groups, where the heterocyclyl optionally includes an additional heteroatom selected from oxygen, sulfur, and nitrogen;
[0015] at least one of X¹, X², X³, X⁴, and X⁵ is present;
[0016] A¹ and A² are each independently selected from one or more of: C₅-C₁₂ haloalkyl, C₅-C₁₂ alkenyl, C₅-C₁₂ alkynyl, (C₅-C₁₂ alkoxy)-(CH₂)ₙ₂—, (C₅-C₁₀ aryl)-(CH₂)ₙ₃— optionally ring substituted with one or two halo, C₁-C₆ alkyl, C₁-C₆ haloalkyl, or C₁-C₆ alkoxy groups, and (C₃-C₈ cycloalkyl)-(CH₂)ₙ₄-optionally ring substituted with 1 or 2 C₁-C₆ alkyl groups; or alternatively A¹ and A² join together with the atoms to which they are bound to form a 5- to 6-membered cyclic acetal substituted with 1 or 2 C₄-C₁₀ alkyl groups;
[0017] n1, n2 and n3 are each individually an integer between 1 and 4; and
[0018] n4 is an integer between zero and 4;
   B) an amino lipid of Formula (Ib):

[chemical structure]

[0019] where:
[0020] R¹ is C₉-C₂₀ alkyl or C₉-C₂₀ alkenyl with 1-3 units of unsaturation;
[0021] X¹ and X² are each independently absent or selected from —O—, NR², and

[chemical structure]

where R² is C₁-C₆ alkyl, and where X¹ and X² are not both —O— or NR²;
[0022] a is an integer between 1 and 6;
[0023] X³ and X⁴ are each independently absent or selected from one or more of: 4- to 7-membered heterocyclyl optionally substituted with 1 or 2 C₁-C₆ alkyl groups, 5- to 6-membered heteroaryl optionally substituted with 1 or 2 C₁-C₆ alkyl groups, and —NR³—, where each R³ is a hydrogen atom or C₁-C₆ alkyl;
[0024] X⁵ is —(CH₂)_{b}—, where b is an integer between 0 and 6;
[0025] X⁶ is hydrogen, C₁-C₆ alkyl, 5- to 6-membered heteroaryl optionally substituted with 1 or 2 C₁-C₆ alkyl groups, or —NR⁴R⁵, where R⁴ and R⁵ are each independently hydrogen or C₁-C₆ alkyl; or alternatively R⁴ and R⁵ join together with the nitrogen to which they are bound to form a 4- to 7-membered heterocyclyl optionally substituted with 1 or 2 C₁-C₆ alkyl groups, where the heterocyclyl optionally includes an additional heteroatom selected from oxygen, sulfur, and nitrogen;
[0026] X⁷ is hydrogen or —NR⁶R⁷, where R⁶ and R⁷ are each independently hydrogen or C₁-C₆ alkyl; or alternatively R⁶ and R⁷ join together with the nitrogen to which they are bound to form a 4- to 7-membered heterocyclyl optionally substituted with 1 or 2 C₁-C₆ alkyl groups, where the heterocyclyl optionally includes an additional heteroatom selected from oxygen, sulfur, and nitrogen;
[0027] at least one of X¹, X², X³, X⁴, and X⁵ is present; and
[0028] provided that when either X¹ or X² is —O—, neither X³ nor X⁴ is

[chemical structure]

and when either X¹ or X² is —O—, R⁴ and R⁵ are not both ethyl;
[0029] C) an amino lipid of Formula (Ic):

[chemical structure]

or its N-oxide, or a salt thereof, where
   [0030] L1 is C₁-6 alkylenyl, or C₂-6 heteroalkylenyl;
[0031] each L² is independently C₂-10 alkylenyl, or C₃-10 heteroalkylenyl;
[0032] L is absent, C₁-10 alkylenyl, or C₂-10 heteroalkylenyl;
[0033] L³ is absent, C₁-10 alkylenyl, or C₂-10 heteroalkylenyl;
[0034] X is absent, —OC(O)—, —C(O)O—, or —OC(O)O—;
[0035] each R is independently hydrogen,

[chemical structure]

or an optionally substituted group selected from C₆-20 aliphatic, C₆-20 haloaliphatic, a 3- to 7-membered cycloaliphatic ring, 1-adamantyl, 2-adamantyl, sterolyl, and phenyl;
[0036] R¹ is hydrogen, a 3- to 7-membered cycloaliphatic ring, a 3- to 7-membered heterocyclic ring containing 1-3 heteroatoms independently selected from nitrogen, oxygen, and sulfur, —OR², —C(O)OR², —C(O)SR², —OC(O)R², —OC(O)OR², —CN, —N(R²)₂, —C(O)N(R²)₂, —NR²C(O)R², —OC(O)N(R²)₂, —N(R²)C(O)OR², —NR²S(O)₂R², —NR²C(O)N(R²)₂, —NR²C(S)N(R²)₂, —NR²C(NR²)N(R²)₂, —NR²C(CHR²)N(R²)₂, —N(OR²)C(O)R², —N(OR²)S(O)₂R², —N(OR²)C(O)OR², —N(OR²)C(O)N(R²)₂, —N(OR²)C(S)N(R²)₂, —N(OR²)C(NR²)N(R²)₂, —N(OR²)C(CHR²)N(R²)₂, —C(NR²)N(R²)₂, —C(NR²)R², —C(O)N(R²)OR², —C(R²)N(R²)₂C(O)OR²,

[chemical structure]

—CR²(OR²)R³,

[chemical structure]

[0037] each R² is independently hydrogen, —CN, —NO₂, —OR⁴, —S(O)₂R⁴, —S(O)₂N(R⁴)₂, —(CH₂)ₙ—R⁴, or an optionally substituted group selected from C₁-6 aliphatic, a 3- to 7-membered cycloaliphatic ring, and a 3- to 7-membered heterocyclic ring containing 1-3 heteroatoms independently selected from nitrogen, oxygen, and sulfur, or
   [0038] two occurrences of R², taken together with the atom(s) to which they are attached, form an optionally substituted 4- to 7-membered heterocyclic ring containing 0-1 additional heteroatom selected from nitrogen, oxygen, and sulfur;
[0039] each R³ is independently —(CH₂)ₙ—R⁴, or
   [0040] two occurrences of R³, taken together with the atoms to which they are attached, form an optionally substituted 5- to 6-membered heterocyclic ring containing 0-1 additional heteroatom selected from nitrogen, oxygen, and sulfur;
[0041] each R⁴ is independently
[0042] hydrogen, —OR⁵, —N(R⁵)₂, —OC(O)R⁵, —OC(O)OR⁵, —CN, —C(O)N(R⁵)₂, —NR⁵C(O)R⁵, —OC(O)N(R⁵)₂, —N(R⁵)C(O)OR⁵, —NR⁵S(O)₂R⁵, —NR⁵C(O)N(R⁵)₂, —NR⁵C(S)N(R⁵)₂, —NR⁵C(NR⁵)N(R⁵)₂, or

[chemical structure]

[0043] each R⁵ is independently hydrogen, optionally substituted C₁₋₆ aliphatic, or
   [0044] two occurrences of R⁵, taken together with the atom(s) to which they are attached, form an optionally substituted 4- to 7-membered heterocyclic ring containing 0-1 additional heteroatom selected from nitrogen, oxygen, and sulfur;
[0045] each R⁶ is independently C₄-12 aliphatic; and
   [0046] n is 0 to 4;
   [0047] D) an amino lipid of Formula (Id):

[chemical structure]

[0048] or its N-oxide, or a pharmaceutically acceptable salt thereof, where
[0049] L1 is absent, C₁-6 alkylenyl, or C₂-6 heteroalkylenyl;
[0050] each L2 is independently optionally substituted C₂₋₁₅ alkylenyl, or optionally substituted C₃₋₁₅ heteroalkylenyl;
[0051] L3 is absent, optionally substituted C₁₋₁₀ alkylenyl, or optionally substituted C₂₋₁₀ heteroalkylenyl;
[0052] X is absent, —OC(O)—, —C(O)O—, or —OC(O)O—;
[0053] each R′ is independently an optionally substituted group selected from C₄-12 aliphatic, 3- to 12-membered cycloaliphatic, 7- to 12-membered bridged bicyclic containing 0-4 heteroatoms independently selected from nitrogen, oxygen, or sulfur, 1-adamantyl, 2-adamantyl, sterolyl, and phenyl;
[0054] R is hydrogen,

[chemical structure]

or an optionally substituted group selected from C₆-20 aliphatic, 3- to 12-membered cycloaliphatic, 7- to 12-membered bridged bicyclic containing 0-4 heteroatoms independently selected from nitrogen, oxygen, or sulfur, 1-adamantyl, 2-adamantyl, sterolyl, and phenyl;
[0055] R¹ is hydrogen, optionally substituted phenyl, optionally substituted 3- to 7-membered cycloaliphatic, optionally substituted 3- to 7-membered heterocyclyl containing 1-3 heteroatoms independently selected from nitrogen, oxygen, and sulfur, optionally substituted 5- to 6-membered monocyclic heteroaryl containing 1-4 heteroatoms independently selected from nitrogen, oxygen, and sulfur, optionally substituted 8- to 10-membered bicyclic heteroaryl containing 1-4 heteroatoms independently selected from nitrogen, oxygen, and sulfur, —OR², —C(O)OR², —C(O) SR², —OC(O)R², —OC(O)OR², —CN, —N(R²)₂, —C(O)N(R²)₂, —S(O)₂N(R²)₂, —NR²C(O)R², —OC(O)N(R²)₂, —N(R²)C(O)OR², —NR²S(O)₂R², —NR²C(O)N(R²)₂, —NR²C(S)N(R²)₂, —NR²C(NR²)N(R²)₂, —NR²C(CHR²)N(R²)₂, —N(OR²)C(O)R², —N(OR²) S(0)₂R², —N(OR²)C(O)OR², —N(OR²)C(O)N(R²)₂, —N(OR²)C(S)N(R²)₂, —N(OR²)C(NR²)N(R²)₂, —N(OR²)C(CHR²)N(R²)₂, —C(NR²)N(R²)₂, —C(NR²)R², —C(O)N(R²)OR², —C(R²)N(R²)₂C(O)OR², —CR² (R³)₂, —OP(O)(OR²)₂, or —P(O) (OR²)₂; or
[0056] R¹ is

[chemical structure]

or a ring selected from 3- to 7-membered cycloaliphatic and 3- to 7-membered heterocyclyl containing 1-3 heteroatoms independently selected from nitrogen, oxygen, and sulfur, where the cycloaliphatic or heterocyclyl ring is optionally substituted with 1-4 R² or R³ groups;
[0057] each R² is independently hydrogen, oxo, —CN, —NO₂, —OR⁴, —S(O)₂R⁴, —S(O)₂N(R⁴)₂, —(CH₂) n-R⁴, or an optionally substituted group selected from C₁-6 aliphatic, phenyl, 3- to 7-membered cycloaliphatic, 5- to 6-membered monocyclic heteroaryl containing 1-4 heteroatoms independently selected from nitrogen, oxygen, and sulfur, and 3- to 7-membered heterocyclyl containing 1-3 heteroatoms independently selected from nitrogen, oxygen, and sulfur; or
   [0058] two occurrences of R², taken together with the atom(s) to which they are attached, form optionally substituted 4- to 7-membered heterocyclyl containing 0-1 additional heteroatom selected from nitrogen, oxygen, and sulfur;
[0059] each R³ is independently-(CH₂) n-R⁴; or
   [0060] two occurrences of R³, taken together with the atom(s) to which they are attached, form optionally substituted 5- to 6-membered heterocyclyl containing 0-1 additional heteroatom selected from nitrogen, oxygen, and sulfur;
[0061] each R⁴ is independently hydrogen, —OR⁵, —N(R⁵)₂, —OC(O)R⁵, —OC(O)OR⁵, —CN, —C(O)N(R⁵)₂,
   [0062] —NR⁵C(O)R⁵, —OC(O)N(R⁵)₂, —N(R⁵)C(O)OR⁵, —NR⁵S(O)₂R⁵, —NR⁵C(O)N(R⁵)₂,
   [0063] —NR⁵C(S)N(R⁵)₂, —NR⁵° C. (NR⁵)N(R⁵)₂, or

[chemical structure]

[0064] each R⁵ is independently hydrogen, or optionally substituted C₁₋₆ aliphatic; or
   [0065] two occurrences of R⁵, taken together with the atom(s) to which they are attached, form optionally substituted 4- to 7-membered heterocyclyl containing 0-1 additional heteroatom selected from nitrogen, oxygen, and sulfur;
[0066] each R⁶ is independently C₄₋₁₂ aliphatic; and
[0067] each n is independently 0 to 4;
   [0068] E) an amino lipid of Formula (Ie):

[chemical structure]

[0069] or a pharmaceutically acceptable salt thereof, where:
[0070] L1 is a covalent bond, —C(O)—, or —OC(O)—;
[0071] L2 is a covalent bond, an optionally substituted bivalent saturated or unsaturated, straight or branched C₁-C₁₂ hydrocarbon chain, or

[chemical structure]

[0072] Cy^{A} is an optionally substituted ring selected from phenylene and 3- to 7-membered saturated or partially unsaturated carbocyclene;
[0073] each m is independently 0, 1, or 2;
[0074] L3 is a covalent bond, —C(O)—, —C(O)O—, —OC(O)—, —O—, or —OC(O)O—;
[0075] R¹ is

[chemical structure]

or an optionally substituted saturated or unsaturated, straight or branched C₁-C₂₀ hydrocarbon chain where 1-3 methylene units are optionally and independently replaced with —O— or —NR—;
[0076] Cy^{B} is an optionally substituted ring selected from 3- to 12-membered saturated or partially unsaturated carbocyclyl, 1-adamantyl, 2-adamantyl,

[chemical structure]

sterolyl, and phenyl;
[0077] p is 0, 1, 2, or 3;
[0078] X¹ is a covalent bond, —O—, or —NR—;
[0079] X² is a covalent bond or an optionally substituted, bivalent saturated or unsaturated, straight or branched, C₁-C₁₂ hydrocarbon chain, where 1-3 methylene units are optionally and independently replaced with —O—, —NR—, or —Cy^{c}—;
[0080] Cy^{C} is an optionally substituted ring selected from 3- to 7-membered saturated or partially unsaturated carbocyclene, phenylene, 3- to 7-membered saturated or partially unsaturated heterocyclene having 1-3 heteroatoms independently selected from nitrogen, oxygen, and sulfur, and 5- to 6-membered heteroarylene having 1-3 heteroatoms independently selected from nitrogen, oxygen, and sulfur;
[0081] X³ is hydrogen or an optionally substituted ring selected from 3- to 7-membered saturated or partially unsaturated carbocyclyl, phenyl, 3- to 7-membered saturated or partially unsaturated heterocyclyl having 1-3 heteroatoms independently selected from nitrogen, oxygen, and sulfur, or 5- to 6-membered heteroaryl having 1-3 heteroatoms independently selected from nitrogen, oxygen, and sulfur;
[0082] each R is independently hydrogen or an optionally substituted C₁-C₆ aliphatic group;
[0083] Z¹ is a covalent bond or —O—;
[0084] Z² is an optionally substituted group selected from 4- to 12-membered saturated or partially unsaturated carbocyclyl, phenyl, 1-adamantyl, and 2-adamantyl;
[0085] Z³ is hydrogen, or an optionally substituted group selected from C₁-C₁₀ aliphatic, and 4- to 12-membered saturated or partially unsaturated carbocyclyl; and
[0086] d is 0, 1, 2, 3, 4, 5, or 6; provided that when L3 is a covalent bond, then R¹ must be

[chemical structure]

[0087] F) an amino lipid of Formula (If):

[chemical structure]

[0088] or a pharmaceutically acceptable salt thereof, where:
[0089] each L¹ and L^{1′} is independently-C(O)— or —C(O)O—;
[0090] each L² and L^{2′} is independently a covalent bond, an optionally substituted bivalent saturated or unsaturated, straight or branched C₁-C₁₂ hydrocarbon chain, or

[chemical structure]

[0091] each Cy^{A} is independently an optionally substituted ring selected from phenylene or a 3- to 7-membered saturated or partially unsaturated carbocyclene;
[0092] each m is independently 0, 1, or 2;
[0093] each L³ and L^{3′} is independently a covalent bond, —C(O)O—, —OC(O)—, —O—, or —OC(O)O—;
[0094] each R¹ and R^{1′} is independently an optionally substituted group selected from a saturated or unsaturated, straight or branched C₁-C₂₀ hydrocarbon chain, where 1-3 methylene units are optionally and independently replaced with —O— or —NR—, a 3- to 12-membered saturated or partially unsaturated carbocyclic ring, 1-adamantyl, 2-adamantyl, sterolyl, phenyl, and

[chemical structure]

[0095] each L⁴ is independently a bivalent saturated or unsaturated, straight or branched C₁-C₆ hydrocarbon chain;
   [0096] each A¹ and A² is independently an optionally substituted C₁-C₂₀ aliphatic or —L⁵-R⁵;
      [0097] or A¹ and A², together with their intervening atoms, may form an optionally substituted ring:

[chemical structure]

where
   [0098] x is selected from 1 or 2; and
   [0099] #represents the point of attachment to L⁴;
[0100] each L⁵ is independently a bivalent saturated or unsaturated, straight or branched C₁-C₂₀ hydrocarbon chain, where 1-3 methylene units are optionally and independently replaced with —O— or —NR—;
[0101] each R⁵ is independently an optionally substituted group selected from a 5- to 10-membered aryl ring and a 3- to 8-membered carbocyclic ring;
[0102] X¹ is a covalent bond, —O—, or —NR—;
   [0103] X² is a covalent bond or an optionally substituted, bivalent saturated or unsaturated, straight or branched, C₁-C₁₂ hydrocarbon chain, where 1-3 methylene units are optionally and independently replaced with —O— or —NR—; X³ is hydrogen or —Cy^{B};
   [0104] Cy^{B} is an optionally substituted ring selected from 3- to 7-membered saturated or partially unsaturated carbocyclyl, phenyl, 3- to 7-membered saturated or partially unsaturated heterocyclyl having 1-3 heteroatoms independently selected from nitrogen, oxygen, and sulfur, and 5- to 6-membered heteroaryl having 1-3 heteroatoms independently selected from nitrogen, oxygen, and sulfur; and
[0105] each R is independently hydrogen or an optionally substituted C₁-C₆ aliphatic group;
   [0106] provided that when X³ is hydrogen, at least one of R¹ or R^{1′} is

[chemical structure]

or
G) an amino lipid of Formula (Ig):

[chemical structure]

[0107] or a pharmaceutically acceptable salt thereof, where:
[0108] each of L¹ and L^{1′} is independently a covalent bond, —C(O)—, or —OC(O)—;
[0109] each of L² and L^{2′} is independently a covalent bond, an optionally substituted bivalent saturated or unsaturated, straight or branched C₁-C₁₂ hydrocarbon chain, or

[chemical structure]

[0110] each Cy^{A} is independently an optionally substituted ring selected from phenylene or 3- to 7-membered saturated or partially unsaturated carbocyclene;
[0111] each m is independently 0, 1, or 2;
[0112] each of L³ and L^{3′} is independently a covalent bond, —O—, —C(O)O—, —OC(O)—, or —OC(O)O—;
[0113] each of R¹ and R^{1′} is independently an optionally substituted group selected from saturated or unsaturated, straight or branched C₁-C₂₀ hydrocarbon chain where 1-3 methylene units are optionally and independently replaced with —O— or —NR—, a 3- to 7-membered saturated or partially unsaturated carbocyclic ring, 1-adamantyl, 2-adamantyl, sterolyl, phenyl, or

[chemical structure]

[0114] each L⁴ is independently a bivalent saturated or unsaturated, straight or branched C₁-C₂₀ hydrocarbon chain;
[0115] each A¹ and A² is independently an optionally substituted C₁-C₂₀ aliphatic or —L⁵—R⁵,
[0116] or A¹ and A², together with their intervening atoms, may form an optionally substituted ring:

[chemical structure]

[0117] where
   [0118] x is selected from 1 or 2; and
   [0119] #represents the point of attachment to L⁴;
[0120] each L⁵ is independently a bivalent saturated or unsaturated, straight or branched C₁-C₂₀ hydrocarbon chain, where 1-3 methylene units are optionally and independently replaced with —O— or —NR—;
[0121] each R⁵ is independently an optionally substituted group selected from a 6- to 10-membered aryl ring or a 3- to 8-membered carbocyclic ring;
[0122] Y¹ is a covalent bond, —C(O)—, or —C(O)O—;
[0123] Y² is a bivalent saturated or unsaturated, straight or branched C₁-C₆ hydrocarbon chain, where 1-2 methylene units are optionally and independently replaced with cyclopropylene, —O—, or —NR—;
[0124] Y³ is an optionally substituted group selected from saturated or unsaturated, straight or branched C₁-C₁₄ hydrocarbon chain, where 1-3 methylene units are optionally and independently replaced with —O— or —NR—, a 3- to 7-membered saturated or partially unsaturated carbocyclic ring, 1-adamantyl, 2-adamantyl, or phenyl;
[0125] X¹ is a covalent bond, —O—, or —NR—;
[0126] X² is an optionally substituted bivalent saturated or unsaturated, straight or branched C₁-C₁₂ hydrocarbon chain, where 1-3 methylene units are optionally and independently replaced with —O—, —NR—, or —Cy^{B}—;
[0127] each Cy^{B} is independently an optionally substituted ring selected from 3- to 7-membered saturated or partially unsaturated carbocyclene, phenylene, 3- to 7-membered heterocyclene having 1-3 heteroatoms independently selected from nitrogen, oxygen, and sulfur, or 5- to 6-membered heteroarylene having 1-3 heteroatoms independently selected from nitrogen, oxygen, and sulfur;
[0128] X³ is hydrogen or an optionally substituted ring selected from 3- to 7-membered saturated or partially unsaturated carbocyclyl, phenyl, 3- to 7-membered heterocyclyl having 1-3 heteroatoms independently selected from nitrogen, oxygen, and sulfur, or 5- to 6-membered heteroaryl having 1-3 heteroatoms independently selected from nitrogen, oxygen, and sulfur; and
[0129] each R is independently hydrogen or an optionally substituted C₁-C₆ aliphatic group

[0130] In another aspect, the disclosure features a pharmaceutical composition containing the LNP of any one of any aspect of the disclosure, or embodiments thereof.

[0131] In another aspect, the disclosure features a method of treating a disease or disorder. The method involves administering to a subject in need thereof the pharmaceutical composition of any aspect of the disclosure, or embodiments thereof.

[0132] In any aspect of the disclosure, or embodiments thereof, the LNP further contains an amino lipid of Formula A′:

[chemical structure]

[0133] or its N-oxide, or a pharmaceutically acceptable salt thereof, where
[0134] L¹ is absent, C₁-6 alkylenyl, or C₂-6 heteroalkylenyl;
[0135] each L² is independently optionally substituted C₂₋₁₅ alkylenyl, or optionally substituted C₃₋₁₅ heteroalkylenyl;
[0136] L is C₁-10 alkylenyl, or C₂-10 heteroalkylenyl;
[0137] X² is —OC(O)—, —C(O)O—, or —OC(O)O—;
[0138] X is absent, —OC(O)—, —C(O)O—, or —OC(O)O—;
[0139] R″ is hydrogen,

[chemical structure]

or an optionally substituted group selected from C₆-20 aliphatic, 3- to 12-membered cycloaliphatic, 7- to 12-membered bridged bicyclic containing 0-4 heteroatoms independently selected from nitrogen, oxygen, or sulfur, 1-adamantyl, 2-adamantyl, sterolyl, and phenyl;
[0140] each of R and R^{a} is independently hydrogen, or an optionally substituted group selected from C₆-20 aliphatic, 3- to 12-membered cycloaliphatic, 7- to 12-membered bridged bicyclic containing 0-4 heteroatoms independently selected from nitrogen, oxygen, or sulfur, 1-adamantyl, 2-adamantyl, sterolyl, and phenyl
[0141] each of L³ and L^{3a} is independently absent, optionally substituted C₁₋₁₀ alkylenyl, or optionally substituted C₂₋₁₀ heteroalkylenyl;
[0142] R¹ is hydrogen, optionally substituted phenyl, optionally substituted 3- to 7-membered cycloaliphatic, optionally substituted 3- to 7-membered heterocyclyl containing 1-3 heteroatoms independently selected from nitrogen, oxygen, and sulfur, optionally substituted 5- to 6-membered monocyclic heteroaryl containing 1-4 heteroatoms independently selected from nitrogen, oxygen, and sulfur, optionally substituted 8- to 10-membered bicyclic heteroaryl containing 1-4 heteroatoms independently selected from nitrogen, oxygen, and sulfur, —OR², —C(O)OR², —C(O) SR², —OC(O)R², —OC(O)OR², —CN, —N(R²)₂, —C(O)N(R²)₂, —S(O)₂N(R²)₂, —NR²C(O)R², —OC(O)N(R²)₂, —N(R²)C(O)OR², —NR²S(O)₂R², —NR²C(O)N(R²)₂, —NR²C(S)N(R²)₂, —NR²C(NR²)N(R²)₂, —NR²C(CHR²)N(R²)₂, —N(OR²)C(O)R², —N(OR²) S(O)₂R², —N(OR²)C(O)OR², —N(OR²)C(O)N(R²)₂, —N(OR²)C(S)N(R²)₂, —N(OR²)C(NR²)N(R²)₂, —N(OR²)C(CHR²)N(R²)₂, —C(NR²)N(R²)₂, —C(NR²)R², —C(O)N(R²)OR², —C(R²)N(R²)₂C(O)OR², —CR² (R³)₂, —OP(O)(OR²)₂, or —P(O)(OR²)₂; or
[0143] R¹ is

[chemical structure]

or a ring selected from 3- to 7-membered cycloaliphatic and 3- to 7-membered heterocyclyl containing 1-3 heteroatoms independently selected from nitrogen, oxygen, and sulfur, where the cycloaliphatic or heterocyclyl ring is optionally substituted with 1-4 R² or R³ groups;
[0144] each R² is independently hydrogen, oxo, —CN, —NO₂, —OR⁴, —S(O)₂R⁴, —S(O)₂N(R⁴)₂, —(CH₂) n-R⁴, or an optionally substituted group selected from C₁-6 aliphatic, phenyl, 3- to 7-membered cycloaliphatic, 5- to 6-membered monocyclic heteroaryl containing 1-4 heteroatoms independently selected from nitrogen, oxygen, and sulfur, and 3- to 7-membered heterocyclyl containing 1-3 heteroatoms independently selected from nitrogen, oxygen, and sulfur; or
   [0145] two occurrences of R², taken together with the atom(s) to which they are attached, form optionally substituted 4- to 7-membered heterocyclyl containing 0-1 additional heteroatom selected from nitrogen, oxygen, and sulfur;
[0146] each R³ is independently —(CH₂)ₙ—R⁴; or
   [0147] two occurrences of R³, taken together with the atom(s) to which they are attached, form optionally substituted 5- to 6-membered heterocyclyl containing 0-1 additional heteroatom selected from nitrogen, oxygen, and sulfur;
[0148] each R⁴ is independently hydrogen, —OR⁵, —N(R⁵)₂, —OC(O)R⁵, —OC(O)OR⁵, —CN, —C(O)N(R⁵)₂,
   [0149] —NR⁵C(O)R⁵, —OC(O)N(R⁵)₂, —N(R⁵)C(O)OR⁵, —NR⁵S(O)₂R⁵, —NR⁵C(O)N(R⁵)₂,
   [0150] —NR⁵C(S)N(R⁵)₂, —NR⁵C(NR⁵)N(R⁵)₂, or

[chemical structure]

[0151] each R⁵ is independently hydrogen, or optionally substituted C₁₋₆ aliphatic; or
   [0152] two occurrences of R⁵, taken together with the atom(s) to which they are attached, form optionally substituted 4- to 7-membered heterocyclyl containing 0-1 additional heteroatom selected from nitrogen, oxygen, and sulfur;
[0153] each R⁶ is independently C₄-12 aliphatic; and
[0154] each n is independently 0 to 4.

[0155] In any aspect of the disclosure, or embodiments thereof, the LNP further contains an amino lipid of Formula I:

[chemical structure]

[0156] or a pharmaceutically acceptable salt thereof, where:
[0157] L¹ is a covalent bond, —C(O)—, or —OC(O)—;
[0158] L² is a covalent bond, an optionally substituted bivalent saturated or unsaturated, straight or branched C₁-C₁₂ hydrocarbon chain, or

[chemical structure]

[0159] Cy^{A} is an optionally substituted ring selected from phenylene and 3- to 7-membered saturated or partially unsaturated carbocyclene;
[0160] each m is independently 0, 1, or 2;
[0161] L³ is a covalent bond, —C(O)—, —C(O)O—, —OC(O)—, —O—, or —OC(O)O—;
[0162] R¹ is

[chemical structure]

an optionally substituted saturated or unsaturated, straight or branched C₁-C₂₀ hydrocarbon chain where 1-3 methylene units are optionally and independently replaced with —O— or —NR—, or

[chemical structure]

[0163] Cy^{B} is an optionally substituted ring selected from 3- to 12-membered saturated or partially unsaturated carbocyclyl, 1-adamantyl, 2-adamantyl,

[chemical structure]

sterolyl, and phenyl;
[0164] p is 0, 1, 2, or 3;
[0165] each L⁴ is independently a bivalent saturated or unsaturated, straight or branched C₁-C₆ hydrocarbon chain;
[0166] each A¹ and A² is independently an optionally substituted C₁-C₂₀ aliphatic or —L⁵—R⁵;
[0167] or A¹ and A², together with their intervening atoms, may form an optionally substituted ring:

[chemical structure]

[0168] where
   [0169] x is selected from 1 or 2; and
   [0170] #represents the point of attachment to L⁴;
[0171] each L⁵ is independently a bivalent saturated or unsaturated, straight or branched C₁-C₂₀ hydrocarbon chain, where 1-3 methylene units are optionally and independently replaced with —O— or —NR—;
[0172] each R⁵ is independently an optionally substituted group selected from a 5- to 10-membered aryl ring or a 3- to 8-membered carbocyclic ring;
[0173] X¹ is a covalent bond, —O—, or —NR—;
[0174] X² is a covalent bond or an optionally substituted, bivalent saturated or unsaturated, straight or branched, C₁-C₁₂ hydrocarbon chain, where 1-3 methylene units are optionally and independently replaced with —O—, —NR—, or —Cy^{C}—;
[0175] Cy^{C} is an optionally substituted ring selected from 3- to 7-membered saturated or partially unsaturated carbocyclene, phenylene, 3- to 7-membered saturated or partially unsaturated heterocyclene having 1-3 heteroatoms independently selected from nitrogen, oxygen, and sulfur, and 5- to 6-membered heteroarylene having 1-3 heteroatoms independently selected from nitrogen, oxygen, and sulfur;
[0176] X³ is hydrogen or an optionally substituted ring selected from 3- to 7-membered saturated or partially unsaturated carbocyclyl, phenyl, 3- to 7-membered saturated or partially unsaturated heterocyclyl having 1-3 heteroatoms independently selected from nitrogen, oxygen, and sulfur, or 5- to 6-membered heteroaryl having 1-3 heteroatoms independently selected from nitrogen, oxygen, and sulfur; and
[0177] each R is independently hydrogen or an optionally substituted C₁-C₆ aliphatic group; provided that when L³ is a covalent bond, then R¹ must be

[chemical structure]

[0178] In any aspect of the disclosure, or embodiments thereof, the LNP contains an N: P ratio of between about 1:40 to about 1:1.

[0179] In any aspect of the disclosure, or embodiments thereof, the LNP contains an N: P ratio of about 1:6.

[0180] In any aspect of the disclosure, or embodiments thereof, the guide polynucleotide contains a scaffold sequence selected from the following:
[0181] GUUUUAGAGCUAGAAAUAGCAAGUUAAAAUAAGGCUAGUCCGUUAUCAACUUGAAAAAGUGG CACCGAGUCGGUGCmU*mU*mU*U (SEQ ID NO: 317);
[0182] mGUUUUAGmAmGmCmUmAGmAmAmAmUmAmGmCmAmAGUUmAAmAAmUAmAmGmGmCmUmAG UmCmCGUUAmUmCAAmCmUmUGmAmAmAmAmAmGmUmGGmCmAmCmCmGmAmGmUmCmGmGm UmGmCmU*mU*mU*mU (SEQ ID NO: 317), and
[0183] mG*U*U*U*U*A*G*mA*mG*mC*mU*mA*Gm*Am*Am*Am*Um*Am*Gm*Cm*Am*A*G*U *Um*A*A*mA*A*mU*A*mA*mG*mG*mC*mU*mA*G*U*mC*mC*G*U*U*A*mU*mC*A* A*mC*mU*mU*G*mA*mA*mA*mA*mA*mG*mU*mG*G*mC*mA*mC*mC*mG*mA*mG*mU *mC*mG*mG*mU*mG*mC*mU*mU*mU*mU (SEQ ID NO: 317), where A is adenosine, C is cytidine, G is guanosine, U is uridine, mA is 2′-O-methyladenosine, mC is 2′-O-methylcytidine, mG is 2′-O-methylguanosine, mU is 2′-O-methyluridine, and “*” indicates a phosphorothioate (PS) backbone linkage. In any aspect of the disclosure, or embodiments thereof, the guide polynucleotide contains 2-5 contiguous 2′-O-methylated nucleobases at the 3′ end and at the 5′ end. In any aspect of the disclosure, or embodiments thereof, the guide polynucleotide contains 2-5 contiguous nucleobases at the 3′ end and at the 5′ end that contain phosphorothioate internucleotide linkages.

[0184] In any aspect of the disclosure, or embodiments thereof, the LNP further contains a polynucleotide encoding a base editor containing a nucleic acid programmable DNA binding protein (napDNAbp) and a deaminase domain. In any aspect of the disclosure, or embodiments thereof, the LNP further contains a polynucleotide encoding a nuclease active nucleic acid programmable DNA binding protein (napDNAbp).

[0185] In any aspect of the disclosure, or embodiments thereof, the disease or disorder is hereditary transthyretin amyloidosis, cardiomyopathy, polyneuropathy or senile cardiac amyloidosis.

[0186] In any aspect of the disclosure, or embodiments thereof, the pharmaceutical composition is administered by a route selected from intravenous, intradermal, transdermal, intranasal, intramuscular, subcutaneous, transmucosal or oral.

[0187] In any aspect of the disclosure, or embodiments thereof, the LNP is delivered to liver.

[0188] In any aspect provided herein, or embodiments thereof, the method is not a process for modifying the germline genetic identity of human beings.

[0189] In any aspect of the disclosure, or embodiments thereof, the amino lipid is a compound of Formula III-a-i:

[chemical structure]

[0190] or its N-oxide, or a pharmaceutically acceptable salt thereof, where each of R, R¹, L, L¹, and L² is as defined for Formula A′ of the disclosure.

[0191] In any aspect of the disclosure, or embodiments thereof, the amino lipid is a compound of the formula BLP8-4:

[chemical structure]

[0192] or pharmaceutically acceptable salt thereof.

[0193] In any aspect of the disclosure, or embodiments thereof, the amino lipid is a compound of Formula (VIA):

[chemical structure]

[0194] or a pharmaceutically acceptable salt thereof, where n is 1, 2, 3 or 4, and L², R¹, A¹, A², X², and X³ are as defined for Formula I of the disclosure.

[0195] In any aspect of the disclosure, or embodiments thereof, the amino lipid is a compound of the formula BLP4-71:

[chemical structure]

[0196] or a pharmaceutically acceptable salt thereof.

### Definitions

[0197] Unless defined otherwise, all technical and scientific terms used herein have the meaning commonly understood by a person skilled in the art to which this disclosure belongs. The following references provide one of skill with a general definition of many of the terms used in this disclosure: Singleton et al., Dictionary of Microbiology and Molecular Biology (2nd ed. 1994); The Cambridge Dictionary of Science and Technology (Walker ed., 1988); The Glossary of Genetics, 5th Ed., R. Rieger et al. (eds.), Springer Verlag (1991); and Hale & Marham, The Harper Collins Dictionary of Biology (1991). As used herein, the following terms have the meanings ascribed to them below, unless specified otherwise.

[0198] By “adenine” or “9H-Purin-6-amine” is meant a purine nucleobase with the molecular formula C₅H₅N₅, having the structure

[chemical structure]

and corresponding to CAS No. 73-24-5.

[0199] By “adenosine” or “4-Amino-1-[(2R,3R,4S,5R)-3,4-dihydroxy-5-(hydroxymethyl)oxolan-2-yl]pyrimidin-2 (1H)-one” is meant an adenine molecule attached to a ribose sugar via a glycosidic bond, having the structure

[chemical structure]

and corresponding to CAS No. 65-46-3. Its molecular formula is C₁₀H₁₃N₅O₄.

[0200] By “adenosine deaminase” or “adenine deaminase” is meant a polypeptide or fragment thereof capable of catalyzing the hydrolytic deamination of adenine or adenosine. In some embodiments, the deaminase or deaminase domain is an adenosine deaminase catalyzing the hydrolytic deamination of adenosine to inosine or deoxy adenosine to deoxyinosine. In some embodiments, the adenosine deaminase catalyzes the hydrolytic deamination of adenine or adenosine in deoxyribonucleic acid (DNA). The adenosine deaminases (e.g., engineered adenosine deaminases, evolved adenosine deaminases) provided herein may be from any organism (e.g., eukaryotic, prokaryotic), including but not limited to algae, bacteria, fungi, plants, invertebrates (e.g., insects), and vertebrates (e.g., amphibians, mammals). In some embodiments, the adenosine deaminase is an adenosine deaminase variant with one or more alterations and is capable of deaminating both adenine and cytosine in a target polynucleotide (e.g., DNA, RNA) and may be referred to as a “dual deaminase”. Non-limiting examples of dual deaminases include those described in PCT/US22/22050. In some embodiments, the target polynucleotide is single or double stranded. In some embodiments, the adenosine deaminase variant is capable of deaminating both adenine and cytosine in DNA. In some embodiments, the adenosine deaminase variant is capable of deaminating both adenine and cytosine in single-stranded DNA. In some embodiments, the adenosine deaminase variant is capable of deaminating both adenine and cytosine in RNA. In embodiments, the adenosine deaminase variant is selected from those described in PCT/US2020/018192, PCT/US2020/049975, PCT/US2017/045381, and PCT/US2020/028568, the full contents of which are each incorporated herein by reference in their entireties for all purposes.

[0201] By “adenosine deaminase activity” is meant catalyzing the deamination of adenine or adenosine to guanine in a polynucleotide. In some embodiments, an adenosine deaminase variant as provided herein maintains adenosine deaminase activity (e.g., at least about 30%, 40%, 50%, 60%, 70%, 80%, 90% or more of the activity of a reference adenosine deaminase (e.g., TadA*8.20 or TadA*8.19)).

[0202] By “Adenosine Base Editor (ABE)” is meant a base editor comprising an adenosine deaminase.

[0203] By “Adenosine Base Editor (ABE) polynucleotide” is meant a polynucleotide encoding an ABE.

[0204] By “Adenosine Base Editor 8 (ABE8) polypeptide” or “ABE8” is meant a base editor as defined herein comprising an adenosine deaminase or adenosine deaminase variant comprising one or more of the alterations listed in Table 5B, one of the combinations of alterations listed in Table 5B, or an alteration at one or more of the amino acid positions listed in Table 5B, such alterations are relative to the following reference sequence: MSEVEFSHEYWMRHALTLAKRARDEREVPVGAVLVLNNRVIGEGWNRAIGLHDPTAHAEIMA LRQGGLVMQNYRLIDATLYVTFEPCVMCAGAMIHSRIGRVVFGVRNAKTGAAGSLMDVLHYP GMNHRVEITEGILADECAALLCYFFRMPRQVFNAQKKAQSSTD (SEQ ID NO: 1), or a corresponding position in another adenosine deaminase. In embodiments, ABE8 comprises alterations at amino acids 82 and/or 166 of SEQ ID NO: 1. In some embodiments, ABE8 comprises further alterations, as described herein, relative to the reference sequence.

[0205] By “Adenosine Base Editor 8 (ABE8) polynucleotide” is meant a polynucleotide encoding an ABE8 polypeptide.

[0206] By “Adenosine Base Editor 8.8 (ABE8.8)” or “ABE8.8” is meant a base editor as defined herein comprising an adenosine deaminase variant comprising the alterations Y¹²³H, Y¹⁴⁷R, and Q154R relative to the following reference sequence:

(SEQ ID NO: 1
MSEVEFSHEYWMRHALTLAKRARDEREVPVGAVLVLNNRVIGEGWNRAIG
LHDPTAHAEIMALRQGGLVMQNYRLIDATLYVTFEPCVMCAGAMIHSRIG
RVVFGVRNAKTGAAGSLMDVLHYPGMNHRVEITEGILADECAALLCYFFR
MPRQVFNAQKKAQSSTD;

TadA*7.10), or a corresponding position in another adenosine deaminase. In some embodiments, ABE8.8 comprises further alterations (e.g., 1, 2, 3, 4, 5, 6, 7, 8, 9, 10, 11, 13, 14, or 15 alterations) relative to the reference sequence, or a corresponding position in another adenosine deaminase.

[0207] By “Adenosine Base Editor 8.8 (ABE8.8) polynucleotide” is meant a polynucleotide encoding an ABE8.8 polypeptide.

[0208] By “Adenosine Base Editor 8.13 (ABE8.13) polypeptide” or “ABE8.13” is meant a base editor as defined herein comprising an adenosine deaminase variant comprising the alterations I76Y, Y¹²³H, Y¹⁴⁷R, and Q154R relative to the following reference sequence:

(SEQ ID NO: 1
MSEVEFSHEYWMRHALTLAKRARDEREVPVGAVLVLNNRVIGEGWNRAIG
LHDPTAHAEIMALRQGGLVMQNYRLIDATLYVTFEPCVMCAGAMIHSRI
GRVVFGVRNAKTGAAGSLMDVLHYPGMNHRVEITEGILADECAALLCYFF
RMPRQVFNAQKKAQSSTD;

TadA*7.10). In some embodiments, ABE8.13 comprises further alterations (e.g., 1, 2, 3, 4, 5, 6, 7, 8, 9, 10, 11, 13, 14, or 15 alterations) relative to the reference sequence.

[0209] By “Adenosine Base Editor 8.13 (ABE8.13) polynucleotide” is meant a polynucleotide encoding an ABE8.13 polypeptide.

[0210] “Administering” is referred to herein as providing one or more compositions described herein to a patient or a subject. By way of example and without limitation, composition administration (e.g., injection) can be performed by intravenous (i.v.) injection, sub-cutaneous (s.c.) injection, intradermal (i.d.) injection, intraperitoneal (i.p.) injection, or intramuscular (i.m.) injection. One or more such routes can be employed. Parenteral administration can be, for example, by bolus injection or by gradual perfusion over time. In some embodiments, parenteral administration includes infusing or injecting intravascularly, intravenously, intramuscularly, intraarterially, intrathecally, intratumorally, intradermally, intraperitoneally, transtracheally, subcutaneously, subcuticularly, intraarticularly, subcapsularly, subarachnoidly and intrasternally. Alternatively, or concurrently, administration can be by the oral route.

[0211] By “agent” is meant any small molecule chemical compound, antibody, nucleic acid molecule, or polypeptide, or fragments thereof.

[0212] By “alteration” is meant a change in the level, structure, or activity of an analyte, gene or polypeptide as detected by standard art known methods such as those described herein. As used herein, an alteration includes a change (e.g., increase or reduction) in expression levels. In embodiments, the increase or reduction in expression levels is by 10%, 25%, 40%, 50% or greater. In some embodiments, an alteration includes an insertion, deletion, or substitution of a nucleobase or amino acid (by, e.g., genetic engineering).

[0213] By “ameliorate” is meant reduce, suppress, attenuate, diminish, arrest, or stabilize the development or progression of a disease.

[0214] By “amyloidosis” is meant a disease associated with buildup of amyloid in a tissue of a subject. In embodiments, amyloidosis affects the nervous system (e.g., central nervous system), heart, or liver.

[0215] By “analog” is meant a molecule that is not identical but has analogous functional or structural features. For example, a polypeptide analog retains the biological activity of a corresponding naturally-occurring polypeptide, while having certain biochemical modifications that enhance the analog's function relative to a naturally occurring polypeptide. Such biochemical modifications could increase the analog's protease resistance, membrane permeability, or half-life, without altering, for example, ligand binding. An analog may include an unnatural amino acid.

[0216] By “base editor (BE),” or “nucleobase editor polypeptide (NBE)” is meant an agent that binds a polynucleotide and has nucleobase modifying activity. In various embodiments, the base editor comprises a nucleobase modifying polypeptide (e.g., a deaminase) and a polynucleotide programmable nucleotide binding domain (e.g., Cas9 or Cpf1). Representative nucleic acid and protein sequences of base editors include those sequences having about or at least about 85% sequence identity to any base editor sequence provided in the sequence listing, such as those corresponding to SEQ ID NOs: 2-11.

[0217] By “BE4 cytidine deaminase (BE4) polypeptide,” is meant a base editor comprising a nucleic acid programmable DNA binding protein (napDNAbp) domain, a cytidine deaminase domain, and two uracil glycosylase inhibitor domains (UGIs). In embodiments, the napDNAbp is a Cas9n (D10A) polypeptide. Non-limiting examples of cytidine deaminase domains include rAPOBEC, ppAPOBEC, RrA3F, AmAPOBEC1, and SsAPOBEC3B. In an embodiment, a BE4 polypeptide shares at least 85% sequence identity to the following reference sequence:
[0218] MSSETGPVAVDPTLRRRIEPHEFEVFFDPRELRKETCLLYEINWGGRHSIWRHTSQNTNKHV EVNFIEKFTTERYFCPNTRCSITWFLSWSPCGECSRAITEFLSRYPHVTLFIYIARLYHHAD PRNRQGLRDLISSGVTI QIMTEQESGYCWRNFVNYSPSNEAHWPRYPHLWVRLYVLELYCII LGLPPCLNILRRKQPQLTFFTIALQSCHYQRLPPHILWATGLK (SEQ ID NO: 21; BE4 cytidine deaminase domain). In some embodiments, BE4 comprises further alterations (e.g., 1, 2, 3, 4, 5, 6, 7, 8, 9, 10, 11, 13, 14, or 15 alterations) relative to the reference sequence.

[0219] By “BE4 cytidine deaminase (BE4) polynucleotide,” is meant a polynucleotide encoding a BE4 polypeptide.

[0220] By “base editing activity” is meant acting to chemically alter a base within a polynucleotide. In one embodiment, a first base is converted to a second base. In one embodiment, the base editing activity is cytidine deaminase activity, e.g., converting target C·G to T·A. In another embodiment, the base editing activity is adenosine or adenine deaminase activity, e.g., converting A·T to G·C.

[0221] The term “base editor system” refers to an intermolecular complex for editing a nucleobase of a target nucleotide sequence. In various embodiments, the base editor (BE) system comprises (1) a polynucleotide programmable nucleotide binding domain, a deaminase domain (e.g., cytidine deaminase or adenosine deaminase) for deaminating nucleobases in the target nucleotide sequence; and (2) one or more guide polynucleotides (e.g., guide RNA) in conjunction with the polynucleotide programmable nucleotide binding domain. In various embodiments, the base editor (BE) system comprises a nucleobase editor domain selected from an adenosine deaminase or a cytidine deaminase, and a domain having nucleic acid sequence specific binding activity. In some embodiments, the base editor system comprises (1) a base editor (BE) comprising a polynucleotide programmable DNA binding domain and a deaminase domain for deaminating one or more nucleobases in a target nucleotide sequence; and (2) one or more guide RNAs in conjunction with the polynucleotide programmable DNA binding domain. In some embodiments, the polynucleotide programmable nucleotide binding domain is a polynucleotide programmable DNA binding domain. In some embodiments, the base editor is a cytidine base editor (CBE). In some embodiments, the base editor is an adenine or adenosine base editor (ABE). In some embodiments, the base editor is an adenine or adenosine base editor (ABE) or a cytidine or cytosine base editor (CBE). In some embodiments, the base editor system (e.g., a base editor system comprising a cytidine deaminase) comprises a uracil glycosylase inhibitor or other agent or peptide (e.g., a uracil stabilizing protein such as provided in WO2022015969, the disclosure of which is incorporated herein by reference in its entirety for all purposes) that inhibits the inosine base excision repair system.

[0222] The term “Cas9” or “Cas9 domain” refers to an RNA guided nuclease comprising a Cas9 protein, or a fragment thereof (e.g., a protein comprising an active, inactive, or partially active DNA cleavage domain of Cas9, and/or the gRNA binding domain of Cas9). A Cas9 nuclease is also referred to sometimes as a casnl nuclease or a CRISPR (clustered regularly interspaced short palindromic repeat) associated nuclease.

[0223] By “bhCas12b v4 polypeptide” or “bhCas12b v4” is meant an endonuclease variant comprising a sequence with at least about 85% sequence identity to the following reference sequence and having endonuclease activity:
[0224] MAPKKKRKVGIHGVPAAATRSFILKIEPNEEVKKGLWKTHEVLNHGIAYYMNILKLIRQEAI YEHHEQDPKNPKKVSKAEIQAELWDFVLKMQKCNSFTHEVDKDEVFNILRELYEELVPSSVE KKGEANQLSNKFLYPLVDPNSQSGKGTASSGRKPRWYNLKIAGDPSWEEEKKKWEEDKKKDP LAKILGKLAEYGLIPLFIPYTDSNEPIVKEIKWMEKSRNQSVRRLDKDMFIQALERFLSWES WNLKVKEEYEKVEKEYKTLEERIKEDIQALKALEQYEKERQEQLLRDTLNTNEYRLSKRGLR GWREIIQKWLKMDENEPSEKYLEVFKDYQRKHPREAGDYSVYEFLSKKENHFIWRNHPEYPY LYATFCEIDKKKKDAKQQATFTLADPINHPLWVRFEERSGSNLNKYRILTEQLHTEKLKKKL TVQLDRLIYPTESGGWEEKGKVDIVLLPSRQFYNQIFLDIEEKGKHAFTYKDESIKFPLKGT LGGARVQFDRDHLRRYPHKVESGNVGRIYFNMTVNIEPTESPVSKSLKIHRDDFPKVVNFKP KELTEWIKDSKGKKLKSGIESLEIGLRVMSIDLGQRQAAAASIFEVVDQKPDIEGKLFFPIK GTELYAVHRASFNIKLPGETLVKSREVLRKAREDNLKLMNQKLNFLRNVLHFQQFEDITERE KRVTKWISRQENSDVPLVYQDELIQIRELMYKPYKDWVAFLKQLHKRLEVEIGKEVKHWRKS LSDGRKGLYGISLKNIDEIDRTRKFLLRWSLRPTEPGEVRRLEPGORFAIDQLNHLNALKED RLKKMANTIIMHALGYCYDVRKKKWQAKNPACQIILFEDLSNYNPYGERSRFENSRLMKWSR REIPRQVALQGEIYGLQVGEVGAQFSSRFHAKTGSPGIRCRVVTKEKLQDNRFFKNLQREGR LTLDKIAVLKEGDLYPDKGGEKFISLSKDRKCVTTHADINAAQNLQKRFWTRTHGFYKVYCK AYQVDGQTVYIPESKDQKQKIIEEFGEGYFILKDGVYEWVNAGKLKIKKGSSKQSSSELVDS DILKDSFDLASELKGEKLMLYRDPSGNVFPSDKWMAAGVFFGKLERILISKLTNQYSISTIE DDSSKQSMSGGSKRTADGSEFESPKKKRKVE (SEQ ID NO: 463). In some embodiments, bhCAS12b v4 comprises further alterations (e.g., 1, 2, 3, 4, 5, 6, 7, 8, 9, 10, 11, 13, 14, or 15 alterations) relative to the reference sequence.

[0225] By “bhCas12b v4 polynucleotide” is meant a polynucleotide encoding a bhCas12b v4.

[0226] The term “conservative amino acid substitution” or “conservative mutation” refers to the replacement of one amino acid by another amino acid with a common property. A functional way to define common properties between individual amino acids is to analyze the normalized frequencies of amino acid changes between corresponding proteins of homologous organisms (Schulz, G. E. and Schirmer, R. H., Principles of Protein Structure, Springer-Verlag, New York (1979)). According to such analyses, groups of amino acids can be defined where amino acids within a group exchange preferentially with each other, and therefore resemble each other most in their impact on the overall protein structure (Schulz, G. E. and Schirmer, R. H., supra). Non-limiting examples of conservative mutations include amino acid substitutions of amino acids, for example, lysine for arginine and vice versa such that a positive charge can be maintained; glutamic acid for aspartic acid and vice versa such that a negative charge can be maintained; serine for threonine such that a free-OH can be maintained; and glutamine for asparagine such that a free —NH₂ can be maintained.

[0227] The term “coding sequence” or “protein coding sequence” as used interchangeably herein refers to a segment of a polynucleotide that codes for a protein. Coding sequences can also be referred to as open reading frames. The region or sequence is bounded nearer the 5′ end by a start codon and nearer the 3′ end with a stop codon. Stop codons useful with the base editors described herein include the following: TAG, TAA, and TGA.

[0228] By “complex” is meant a combination of two or more molecules whose interaction relies on inter-molecular forces. Non-limiting examples of inter-molecular forces include covalent and non-covalent interactions. Non-limiting examples of non-covalent interactions include hydrogen bonding, ionic bonding, halogen bonding, hydrophobic bonding, van der Waals interactions (e.g., dipole-dipole interactions, dipole-induced dipole interactions, and London dispersion forces), and x-effects. In an embodiment, a complex comprises polypeptides, polynucleotides, or a combination of one or more polypeptides and one or more polynucleotides. In one embodiment, a complex comprises one or more polypeptides that associate to form a base editor (e.g., base editor comprising a nucleic acid programmable DNA binding protein, such as Cas9, and a deaminase) and a polynucleotide (e.g., a guide RNA). In an embodiment, the complex is held together by hydrogen bonds. It should be appreciated that one or more components of a base editor (e.g., a deaminase, or a nucleic acid programmable DNA binding protein) may associate covalently or non-covalently. As one example, a base editor may include a deaminase covalently linked to a nucleic acid programmable DNA binding protein (e.g., by a peptide bond). Alternatively, a base editor may include a deaminase and a nucleic acid programmable DNA binding protein that associate noncovalently (e.g., where one or more components of the base editor are supplied in trans and associate directly or via another molecule such as a protein or nucleic acid). In an embodiment, one or more components of the complex are held together by hydrogen bonds.

[0229] By “cytosine” or “4-Aminopyrimidin-2 (1H)-one” is meant a purine nucleobase with the molecular formula C₄H₅N₃₀, having the structure

[chemical structure]

and corresponding to CAS No. 71-30-7.

[0230] By “cytidine” is meant a cytosine molecule attached to a ribose sugar via a glycosidic bond, having the structure

[chemical structure]

and corresponding to CAS No. 65-46-3. Its molecular formula is C₉H₁₃N₃O₅.

[0231] By “Cytidine Base Editor (CBE)” is meant a base editor comprising a cytidine deaminase.

[0232] By “Cytidine Base Editor (CBE) polynucleotide” is meant a polynucleotide encoding a CBE.

[0233] By “cytidine deaminase” or “cytosine deaminase” is meant a polypeptide or fragment thereof capable of deaminating cytidine or cytosine. In embodiments, the cytidine or cytosine is present in a polynucleotide. In one embodiment, the cytidine deaminase converts cytosine to uracil or 5-methylcytosine to thymine. The terms “cytidine deaminase” and “cytosine deaminase” are used interchangeably throughout the application. Petromyzon marinus cytosine deaminase 1 (PmCDA1) (SEQ ID NO: 13-14), Activation-induced cytidine deaminase (AICDA) (SEQ ID NOs: 15-21), and APOBEC(SEQ ID NOs: 12-61) are exemplary cytidine deaminases. Further exemplary cytidine deaminase (CDA) sequences are provided in the Sequence Listing as SEQ ID NOs: 62-66 and SEQ ID NOs: 67-189. Non-limiting examples of cytidine deaminases include those described in PCT/US20/16288, PCT/US2018/021878, 180802-021804/PCT, PCT/US2018/048969, and PCT/US2016/058344.

[0234] By “cytosine deaminase activity” is meant catalyzing the deamination of cytosine or cytidine. In one embodiment, a polypeptide having cytosine deaminase activity converts an amino group to a carbonyl group. In an embodiment, a cytosine deaminase converts cytosine to uracil (i.e., C to U) or 5-methylcytosine to thymine (i.e., 5mC to T). In some embodiments, a cytosine deaminase as provided herein has increased cytosine deaminase activity (e.g., at least 10-fold, 20-fold, 30-fold, 40-fold, 50-fold, 60-fold, 70-fold, 80-fold, 90-fold, 100-fold or more) relative to a reference cytosine deaminase.

[0235] The term “deaminase” or “deaminase domain,” as used herein, refers to a protein or fragment thereof that catalyzes a deamination reaction.

[0236] “Detect” refers to identifying the presence, absence or amount of the analyte to be detected. In one embodiment, a sequence alteration in a polynucleotide or polypeptide is detected. In another embodiment, the presence of indels is detected.

[0237] By “detectable label” is meant a composition that when linked to a molecule of interest renders the latter detectable, via spectroscopic, photochemical, biochemical, immunochemical, or chemical means. For example, useful labels include radioactive isotopes, magnetic beads, metallic beads, colloidal particles, fluorescent dyes, electron-dense reagents, enzymes (for example, as commonly used in an enzyme linked immunosorbent assay (ELISA)), biotin, digoxigenin, or haptens.

[0238] By “disease” is meant any condition or disorder that damages or interferes with the normal function of a cell, tissue, or organ. Exemplary diseases include diseases amenable to treatment using the methods and/or compositions of the present disclosure include as non-limiting examples amyloidosis, cardiomyopathy, familial amyloid polyneuropathy (FAP), familial amyloid cardiomyopathy (FAC), familial transthyretin amyloidosis (FTA), senile systemic amyloidosis (SSA), transthyretin amyloidosis, and the like. The disease can be any disease associated with a mutation to a transthyretin (TTR) polynucleotide sequence.

[0239] By “dual editing activity” or “dual deaminase activity” is meant having adenosine deaminase and cytidine deaminase activity. In one embodiment, a base editor having dual editing activity has both A→G and C→T activity, wherein the two activities are approximately equal or are within about 10% or 20% of each other. In another embodiment, a dual editor has A→G activity that no more than about 10% or 20% greater than C→T activity. In another embodiment, a dual editor has A→G activity that is no more than about 10% or 20% less than C→T activity. In some embodiments, the adenosine deaminase variant has predominantly cytosine deaminase activity, and little, if any, adenosine deaminase activity. In some embodiments, the adenosine deaminase variant has cytosine deaminase activity, and no significant or no detectable adenosine deaminase activity.

[0240] By “effective amount” is meant the amount of an agent (e.g., a base editor, cell) as described herein, that is required to ameliorate the symptoms of a disease relative to an untreated patient or an individual without disease, i.e., a healthy individual, or is the amount of the agent sufficient to elicit a desired biological response. The effective amount of active compound(s) used to practice embodiments of the present disclosure for therapeutic treatment of a disease varies depending upon the manner of administration, the age, body weight, and general health of the subject. Ultimately, the attending physician or veterinarian will decide the appropriate amount and dosage regimen. Such amount is referred to as an “effective” amount. In one embodiment, an effective amount is the amount of a base editor of the disclosure sufficient to introduce an alteration in a gene of interest in a cell (e.g., a cell in vitro or in vivo). In one embodiment, an effective amount is the amount of a base editor required to achieve a therapeutic effect. Such therapeutic effect need not be sufficient to alter a pathogenic gene in all cells of a subject, tissue or organ, but only to alter the pathogenic gene in about 1%, 5%, 10%, 25%, 50%, 75% or more of the cells present in a subject, tissue or organ. In one embodiment, an effective amount is sufficient to ameliorate one or more symptoms of a disease.

[0241] The term “exonuclease” refers to a protein or polypeptide capable of removing successive nucleotides from either the 5′ or 3′ end of a polynucleotide.

[0242] The term “endonuclease” refers to a protein or polypeptide capable of catalyzing the cleavage of internal regions in a polynucleotide.

[0243] By “fragment” is meant a portion of a polypeptide or nucleic acid molecule. This portion contains, at least about 10%, 20%, 30%, 40%, 50%, 60%, 70%, 80%, or 90% of the entire length of the reference nucleic acid molecule or polypeptide. A fragment may contain 10, 20, 30, 40, 50, 60, 70, 80, 90, or 100, 200, 300, 400, 500, 600, 700, 800, 900, or 1000 nucleotides or amino acids. In some embodiments, the fragment is a functional fragment.

[0244] The term “gene editing” or “gene modification” and its grammatical equivalents as used herein refers to genetic engineering in which one or more nucleotides are inserted, replaced, or removed from a genome. Gene editing can be performed using a nuclease (e.g., a natural-existing nuclease or an artificially engineered nuclease). Gene modification can include introducing a double stranded break, a non-sense mutation, a frameshift mutation, a splice site alteration, or an inversion in a polynucleotide sequence, e.g., a target polynucleotide sequence. FIG. 1A depicts a crispr Cas9 protein which is an RNA-guided endonuclease that can be used to impart a double-stranded break at a site-specific location in DNA or a gene. Gene modification can also be accomplished using other editors, such as base editors.

[0245] By “guide polynucleotide” is meant a polynucleotide or polynucleotide complex which is specific for a target sequence and can form a complex with a polynucleotide programmable nucleotide binding domain protein (e.g., Cas9 or Cpf1). In an embodiment, the guide polynucleotide is a guide RNA (gRNA). gRNAs can exist as a complex of two or more RNAs, or as a single RNA molecule.

[0246] “Hybridization” means hydrogen bonding, which may be Watson-Crick, Hoogsteen or reversed Hoogsteen hydrogen bonding, between complementary nucleobases. For example, adenine and thymine are complementary nucleobases that pair through the formation of hydrogen bonds.

[0247] By “increases” is meant a positive alteration of at least 10%, 25%, 50%, 75%, or 100%, or about 1.5 fold, about 2 fold, about 3-fold, about 4-fold, about 5-fold, about 6-fold, about 7-fold, about 8-fold, about 9-fold, about 10-fold, about 15-fold, about 20-fold, about 25-fold, about 30-fold, about 35-fold, about 40-fold, about 45-fold, about 50-fold, or about 100-fold.

[0248] The terms “inhibitor of base repair”, “base repair inhibitor”, “IBR” or their grammatical equivalents refer to a protein that is capable in inhibiting the activity of a nucleic acid repair enzyme, for example a base excision repair enzyme.

[0249] The terms “isolated,” “purified,” or “biologically pure” refer to material that is free to varying degrees from components which normally accompany it as found in its native state. “Isolate” denotes a degree of separation from original source or surroundings. “Purify” denotes a degree of separation that is higher than isolation. A “purified” or “biologically pure” protein is sufficiently free of other materials such that any impurities do not materially affect the biological properties of the protein or cause other adverse consequences. That is, a nucleic acid or peptide of this disclosure is purified if it is substantially free of cellular material, viral material, or culture medium when produced by recombinant DNA techniques, or chemical precursors or other chemicals when chemically synthesized. Purity and homogeneity are typically determined using analytical chemistry techniques, for example, polyacrylamide gel electrophoresis or high performance liquid chromatography. The term “purified” can denote that a nucleic acid or protein gives rise to essentially one band in an electrophoretic gel. For a protein that can be subjected to modifications, for example, phosphorylation or glycosylation, different modifications may give rise to different isolated proteins, which can be separately purified.

[0250] By “isolated polynucleotide” is meant a nucleic acid molecule that is free of the genes which, in the naturally-occurring genome of the organism from which the nucleic acid molecule of the disclosure is derived, flank the gene. The term therefore includes, for example, a recombinant DNA that is incorporated into a vector; into an autonomously replicating plasmid or virus; or into the genomic DNA of a prokaryote or eukaryote; or that exists as a separate molecule (for example, a cDNA or a genomic or cDNA fragment produced by PCR or restriction endonuclease digestion) independent of other sequences. In addition, the term includes an RNA molecule that is transcribed from a DNA molecule, as well as a recombinant DNA that is part of a hybrid gene encoding additional polypeptide sequence.

[0251] By an “isolated polypeptide” is meant a polypeptide of the disclosure that has been separated from components that naturally accompany it. Typically, the polypeptide is isolated when it is at least 60%, by weight, free from the proteins and naturally-occurring organic molecules with which it is naturally associated. In embodiments, the preparation is at least 75%, at least 90%, or at least 99%, by weight, a polypeptide of the disclosure. An isolated polypeptide of the disclosure may be obtained, for example, by extraction from a natural source, by expression of a recombinant nucleic acid encoding such a polypeptide; or by chemically synthesizing the protein. Purity can be measured by any appropriate method, for example, column chromatography, polyacrylamide gel electrophoresis, or by HPLC analysis.

[0252] The term “linker”, as used herein, refers to a molecule that links two moieties. In one embodiment, the term “linker” refers to a covalent linker (e.g., covalent bond) or a non-covalent linker.

[0253] By “marker” is meant any protein or polynucleotide having an alteration in expression, level, structure, or activity that is associated with a disease or disorder. In an embodiment, the marker is an accumulation of amyloid protein. In an embodiment, the marker is an alteration (e.g., mutation) in the sequence of a in transthyretin polypeptide and/or a transthyretin polynucleotide.

[0254] The term “mutation,” as used herein, refers to a substitution of a residue within a sequence, e.g., a nucleic acid or amino acid sequence, with another residue, or a deletion or insertion of one or more residues within a sequence. Mutations are typically described herein by identifying the original residue followed by the position of the residue within the sequence and by the identity of the newly substituted residue. Various methods for making the amino acid substitutions (mutations) provided herein are well known in the art, and are provided by, for example, Green and Sambrook, Molecular Cloning: A Laboratory Manual (4th ed., Cold Spring Harbor Laboratory Press, Cold Spring Harbor, N.Y. (2012)).

[0255] The terms “nucleic acid” and “nucleic acid molecule,” as used herein, refer to a compound comprising a nucleobase and an acidic moiety, e.g., a nucleoside, a nucleotide, or a polymer of nucleotides. Typically, polymeric nucleic acids, e.g., nucleic acid molecules comprising three or more nucleotides are linear molecules, in which adjacent nucleotides are linked to each other via a phosphodiester linkage. In some embodiments, “nucleic acid” refers to individual nucleic acid residues (e.g., nucleotides and/or nucleosides). In some embodiments, “nucleic acid” refers to an oligonucleotide chain comprising three or more individual nucleotide residues. As used herein, the terms “oligonucleotide” and “polynucleotide” can be used interchangeably to refer to a polymer of nucleotides (e.g., a string of at least three nucleotides). In some embodiments, “nucleic acid” encompasses RNA as well as single and/or double-stranded DNA. Nucleic acids may be naturally occurring, for example, in the context of a genome, a transcript, an mRNA, tRNA, IRNA, siRNA, snRNA, a plasmid, cosmid, chromosome, chromatid, or other naturally occurring nucleic acid molecule. On the other hand, a nucleic acid molecule may be a non-naturally occurring molecule, e.g., a recombinant DNA or RNA, an artificial chromosome, an engineered genome, or fragment thereof, or a synthetic DNA, RNA, DNA/RNA hybrid, or including non-naturally occurring nucleotides or nucleosides. Furthermore, the terms “nucleic acid,” “DNA,” “RNA,” and/or similar terms include nucleic acid analogs, e.g., analogs having other than a phosphodiester backbone. Nucleic acids can be purified from natural sources, produced using recombinant expression systems and optionally purified, chemically synthesized, etc. Where appropriate, e.g., in the case of chemically synthesized molecules, nucleic acids comprise nucleoside analogs such as analogs having chemically modified bases or sugars, and backbone modifications. A nucleic acid sequence is presented in the 5′ to 3′ direction unless otherwise indicated. In some embodiments, a nucleic acid is or comprises natural nucleosides (e.g. adenosine, thymidine, guanosine, cytidine, uridine, deoxyadenosine, deoxythymidine, deoxyguanosine, and deoxycytidine); nucleoside analogs (e.g., 2-aminoadenosine, 2-thiothymidine, inosine, pyrrolo-pyrimidine, 3-methyl adenosine, 5-methylcytidine, 2-aminoadenosine, C5-bromouridine, C5-fluorouridine, C5-iodouridine, C5-propynyl-uridine, C5-propynyl-cytidine, C5-methylcytidine, 2-aminoadenosine, 7-deazaadenosine, 7-deazaguanosine, 8-oxoadenosine, 8-oxoguanosine, O (6)-methylguanine, and 2-thiocytidine); chemically modified bases; biologically modified bases (e.g., methylated bases); intercalated bases; modified sugars (e.g., 2′-fluororibose, ribose, 2′-deoxyribose, arabinose, and hexose); and/or modified phosphate groups (e.g., phosphorothioates and 5′—N-phosphoramidite linkages).

[0256] The term “nuclear localization sequence,” “nuclear localization signal,” or “NLS” refers to an amino acid sequence that promotes import of a protein into the cell nucleus. Nuclear localization sequences are known in the art and described, for example, in Plank et al., International PCT application, PCT/EP2000/011690, filed Nov. 23, 2000, published as WO/2001/038547 on May 31, 2001, the contents of which are incorporated herein by reference for their disclosure of exemplary nuclear localization sequences. In other embodiments, the NLS is an optimized NLS described, for example, by Koblan et al., Nature Biotech. 2018 doi: 10.1038/nbt.4172. In some embodiments, an NLS comprises the amino acid sequence KRTADGSEFESPKKKRKV (SEQ ID NO: 190), KRPAATKKAGQAKKKK (SEQ ID NO: 191), KKTELQTTNAENKTKKL (SEQ ID NO: 192), KRGINDRNFWRGENGRKTR (SEQ ID NO: 193), RKSGKIAAIVVKRPRK (SEQ ID NO: 194), PKKKRKV (SEQ ID NO: 195), MDSLLMNRRKFLYQFKNVRWAKGRRETYLC(SEQ ID NO: 196), PKKKRKVEGADKRTADGSEFESPKKKRKV (SEQ ID NO: 328), or RKSGKIAAIVVKRPRKPKKKRKV (SEQ ID NO: 329).

[0257] The term “nucleobase,” “nitrogenous base,” or “base,” used interchangeably herein, refers to a nitrogen-containing biological compound that forms a nucleoside, which in turn is a component of a nucleotide. The ability of nucleobases to form base pairs and to stack one upon another leads directly to long-chain helical structures such as ribonucleic acid (RNA) and deoxyribonucleic acid (DNA). Five nucleobases-adenine (A), cytosine (C), guanine (G), thymine (T), and uracil (U)—are called primary or canonical. Adenine and guanine are derived from purine, and cytosine, uracil, and thymine are derived from pyrimidine. DNA and RNA can also contain other (non-primary) bases that are modified. Non-limiting exemplary modified nucleobases can include hypoxanthine, xanthine, 7-methylguanine, 5,6-dihydrouracil, 5-methylcytosine (m5C), and 5-hydromethylcytosine. Hypoxanthine and xanthine can be created through mutagen presence, both of them through deamination (replacement of the amine group with a carbonyl group). Hypoxanthine can be modified from adenine. Xanthine can be modified from guanine. Uracil can result from deamination of cytosine. A “nucleoside” consists of a nucleobase and a five carbon sugar (either ribose or deoxyribose). Examples of a nucleoside include adenosine, guanosine, uridine, cytidine, 5-methyluridine (m5U), deoxyadenosine, deoxyguanosine, thymidine, deoxyuridine, and deoxycytidine. Examples of a nucleoside with a modified nucleobase includes inosine (I), xanthosine (X), 7-methylguanosine (m7G), dihydrouridine (D), 5-methylcytidine (m5C), and pseudouridine ( ) A “nucleotide” consists of a nucleobase, a five carbon sugar (either ribose or deoxyribose), and at least one phosphate group. Non-limiting examples of modified nucleobases and/or chemical modifications that a modified nucleobase may include are the following: pseudo-uridine, 5-Methyl-cytosine, 2′-O-methyl-3′-phosphonoacetate, 2′-O-methyl thioPACE (MSP), 2′-O-methyl-PACE (MP), 2′-fluoro RNA (2′-F-RNA), constrained ethyl (S-cEt), 2′-O-methyl (‘M’), 2′-O-methyl-3′-phosphorothioate (‘MS’), 2′-O-methyl-3′-thiophosphonoacetate (‘MSP’), 5-methoxyuridine, phosphorothioate, and N₁-Methylpseudouridine.

[0258] The term “nucleic acid programmable DNA binding protein” or “napDNAbp” may be used interchangeably with “polynucleotide programmable nucleotide binding domain” to refer to a protein that associates with a nucleic acid (e.g., DNA or RNA), such as a guide nucleic acid or guide polynucleotide (e.g., gRNA), that guides the napDNAbp to a specific nucleic acid sequence. In some embodiments, the polynucleotide programmable nucleotide binding domain is a polynucleotide programmable DNA binding domain. In some embodiments, the polynucleotide programmable nucleotide binding domain is a polynucleotide programmable RNA binding domain. In some embodiments, the polynucleotide programmable nucleotide binding domain is a Cas9 protein. A Cas9 protein can associate with a guide RNA that guides the Cas9 protein to a specific DNA sequence that is complementary to the guide RNA. In some embodiments, the napDNAbp is a Cas9 domain, for example a nuclease active Cas9, a Cas9 nickase (nCas9), or a nuclease inactive Cas9 (dCas9). Non-limiting examples of nucleic acid programmable DNA binding proteins include, Cas9 (e.g., dCas9 and nCas9), Cas12a/Cpf1, Cas12b/C₂cl, Cas12c/C₂c3, Cas12d/CasY, Cas12e/CasX, Cas12g, Cas12h, Cas12i, and Cas12j/CasΘ (Cas12j/Casphi). Non-limiting examples of Cas enzymes include Cas1, Cas1B, Cas2, Cas3, Cas4, Cas5, Cas5d, Cas5t, Cas5h, Cas5a, Cas6, Cas7, Cas8, Cas8a, Cas8b, Cas8c, Cas9 (also known as Csn1 or Csx12), Cas10, Cas10d, Cas12a/Cpf1, Cas12b/C2c1, Cas12c/C2c3, Cas12d/CasY, Cas12e/CasX, Cas12g, Cas12h, Cas12i, Cas12j/CasΘ, Cpf1, Csy1, Csy2, Csy3, Csy4, Cse1, Cse2, Cse3, Cse4, Cse5e, Csc1, Csc2, Csa5, Csn1, Csn2, Csm1, Csm2, Csm3, Csm4, Csm5, Csm6, Cmr1, Cmr3, Cmr4, Cmr5, Cmr6, Csb1, Csb2, Csb3, Csx17, Csx14, Csx10, Csx16, CsaX, Csx3, Csx1, Csx1S, Csx11, Csf1, Csf2, CsO, Csf4, Csd1, Csd2, Cst1, Cst2, Csh1, Csh2, Csa1, Csa2, Csa3, Csa4, Csa5, Type II Cas effector proteins, Type V Cas effector proteins, Type VI Cas effector proteins, CARF, DinG, homologues thereof, or modified or engineered versions thereof. Other nucleic acid programmable DNA binding proteins are also within the scope of this disclosure, although they may not be specifically listed in this disclosure. See, e.g., Makarova et al. “Classification and Nomenclature of CRISPR-Cas Systems: Where from Here?” CRISPR J. 2018 October; 1:325-336. doi: 10.1089/crispr.2018.0033; Yan et al., “Functionally diverse type V CRISPR-Cas systems” Science. 2019 Jan. 4;363 (6422): 88-91. doi: 10.1126/science.aav7271, the entire contents of each are hereby incorporated by reference. Exemplary nucleic acid programmable DNA binding proteins and nucleic acid sequences encoding nucleic acid programmable DNA binding proteins are provided in the Sequence Listing as SEQ ID NOs: 197-245, 254-260, and 378.

[0259] The terms “nucleobase editing domain” or “nucleobase editing protein,” as used herein, refers to a protein or enzyme that can catalyze a nucleobase modification in RNA or DNA, such as cytosine (or cytidine) to uracil (or uridine) or thymine (or thymidine), and adenine (or adenosine) to hypoxanthine (or inosine) deaminations, as well as non-templated nucleotide additions and insertions. In some embodiments, the nucleobase editing domain is a deaminase domain (e.g., an adenine deaminase or an adenosine deaminase; or a cytidine deaminase or a cytosine deaminase).

[0260] As used herein, “obtaining” as in “obtaining an agent” includes synthesizing, purchasing, or otherwise acquiring the agent.

[0261] By “subject” or “patient” is meant a mammal, including, but not limited to, a human or non-human mammal. In embodiments, the mammal is a bovine, equine, canine, ovine, rabbit, rodent, nonhuman primate, or feline. In an embodiment, “patient” refers to a mammalian subject with a higher than average likelihood of developing a disease or a disorder. Exemplary patients can be humans, non-human primates, cats, dogs, pigs, cattle, cats, horses, camels, llamas, goats, sheep, rodents (e.g., mice, rabbits, rats, or guinea pigs) and other mammalians that can benefit from the therapies disclosed herein. Exemplary human patients can be male and/or female.

[0262] “Patient in need thereof” or “subject in need thereof” is referred to herein as a patient diagnosed with, at risk or having, predetermined to have, or suspected of having a disease or disorder.

[0263] The terms “pathogenic mutation”, “pathogenic variant”, “disease causing mutation”, “disease causing variant”, “deleterious mutation”, or “predisposing mutation” refers to a genetic alteration or mutation that is associated with a disease or disorder or that increases an individual's susceptibility or predisposition to a certain disease or disorder. In some embodiments, the pathogenic mutation comprises at least one wild-type amino acid substituted by at least one pathogenic amino acid in a protein encoded by a gene. In some embodiments, the pathogenic mutation is in a terminating region (e.g., stop codon). In some embodiments, the pathogenic mutation is in a non-coding region (e.g., intron, promoter, etc.).

[0264] The terms “protein”, “peptide”, “polypeptide”, and their grammatical equivalents are used interchangeably herein, and refer to a polymer of amino acid residues linked together by peptide (amide) bonds. A protein, peptide, or polypeptide can be naturally occurring, recombinant, or synthetic, or any combination thereof.

[0265] The term “fusion protein” as used herein refers to a hybrid polypeptide which comprises protein domains from at least two different proteins.

[0266] The term “recombinant” as used herein in the context of proteins or nucleic acids refers to proteins or nucleic acids that do not occur in nature but are the product of human engineering. For example, in some embodiments, a recombinant protein or nucleic acid molecule comprises an amino acid or nucleotide sequence that comprises at least one, at least two, at least three, at least four, at least five, at least six, or at least seven mutations as compared to any naturally occurring sequence.

[0267] By “reduces” is meant a negative alteration of at least 10%, 25%, 50%, 75%, or 100%.

[0268] By “reference” is meant a standard or control condition. In one embodiment, the reference is a wild-type or healthy cell. In other embodiments and without limitation, a reference is an untreated cell that is not subjected to a test condition, or is subjected to placebo or normal saline, medium, buffer, and/or a control vector that does not harbor a polynucleotide of interest. The reference can be a cell or subject with a pathogenic mutation in a transhyretin (TTR) polynucleotide sequence and/or a transthyretin (TTR) polypeptide sequence. A reference can be a subject or cell with an amyloidosis (e.g., a transthyretin amyloidosis) or a subject or cell without an amyloidosis.

[0269] A “reference sequence” is a defined sequence used as a basis for sequence comparison. A reference sequence may be a subset of or the entirety of a specified sequence; for example, a segment of a full-length cDNA or gene sequence, or the complete cDNA or gene sequence. For polypeptides, the length of the reference polypeptide sequence will generally be at least about 16 amino acids, at least about 20 amino acids, at least about 25 amino acids, about 35 amino acids, about 50 amino acids, or about 100 amino acids. For nucleic acids, the length of the reference nucleic acid sequence will generally be at least about 50 nucleotides, at least about 60 nucleotides, at least about 75 nucleotides, about 100 nucleotides or about 300 nucleotides or any integer thereabout or therebetween. In some embodiments, a reference sequence is a wild-type sequence of a protein of interest. In other embodiments, a reference sequence is a polynucleotide sequence encoding a wild-type protein.

[0270] The term “RNA-programmable nuclease,” and “RNA-guided nuclease” refer to a nuclease that forms a complex with (e.g., binds or associates with) one or more RNA(s) that is not a target for cleavage. In some embodiments, an RNA-programmable nuclease, when in a complex with an RNA, may be referred to as a nuclease-RNA complex. Typically, the bound RNA(s) is referred to as a guide RNA (gRNA). In some embodiments, the RNA-programmable nuclease is the (CRISPR-associated system)Cas9 endonuclease, for example, Cas9 (Csnl) from Streptococcus pyogenes (e.g., SEQ ID NO: 197), Cas9 from Neisseria meningitidis (NmeCas9; SEQ ID NO: 208), Nme2Cas9 (SEQ ID NO: 209), Streptococcus constellatus (ScoCas9), or derivatives thereof (e.g., a sequence with at least about 85% sequence identity to a Cas9, such as Nme2Cas9 or spCas9).

[0271] Amino acids generally can be grouped into classes according to the following common side-chain properties:
[0272] (1) hydrophobic: Norleucine, Met, Ala, Val, Leu, He;
[0273] (2) neutral hydrophilic: Cys, Ser, Thr, Asn, Gin;
[0274] (3) acidic: Asp, Glu;
[0275] (4) basic: His, Lys, Arg;
[0276] (5) residues that influence chain orientation: Gly, Pro;
[0277] (6) aromatic: Trp, Tyr, Phe.

[0278] In some embodiments, conservative substitutions can involve the exchange of a member of one of these classes for another member of the same class. In some embodiments, non-conservative amino acid substitutions can involve exchanging a member of one of these classes for another class.

[0279] The term “single nucleotide polymorphism (SNP)” is a variation in a single nucleotide that occurs at a specific position in the genome, where each variation is present to some appreciable degree within a population (e.g., >1%). SNPs can fall within coding regions of genes, non-coding regions of genes, or in the intergenic regions (regions between genes). In some embodiments, SNPs within a coding sequence do not necessarily change the amino acid sequence of the protein that is produced, due to degeneracy of the genetic code. SNPs in the coding region are of two types: synonymous and nonsynonymous SNPs. Synonymous SNPs do not affect the protein sequence, while nonsynonymous SNPs change the amino acid sequence of protein. The nonsynonymous SNPs are of two types: missense and nonsense. SNPs that are not in protein-coding regions can still affect gene splicing, transcription factor binding, messenger RNA degradation, or the sequence of noncoding RNA. Gene expression affected by this type of SNP is referred to as an eSNP(expression SNP) and can be upstream or downstream from the gene. A single nucleotide variant (SNV) is a variation in a single nucleotide without any limitations of frequency and can arise in somatic cells. A somatic single nucleotide variation can also be called a single-nucleotide alteration.

[0280] By “specifically binds” is meant a nucleic acid molecule, polypeptide, polypeptide/polynucleotide complex, compound, or molecule that recognizes and binds a polypeptide and/or nucleic acid molecule of the disclosure, but which does not substantially recognize and bind other molecules in a sample, for example, a biological sample.

[0281] By “substantially identical” is meant a polypeptide or nucleic acid molecule exhibiting at least 50% identity to a reference amino acid sequence. In one embodiment, a reference sequence is a wild-type amino acid or nucleic acid sequence. In another embodiment, a reference sequence is any one of the amino acid or nucleic acid sequences described herein. In one embodiment, such a sequence is at least about 60%, 80%, 85%, 90%, 95%, 96%, 97%, 98%, 99%, 99.9%, or even 99.99%, identical at the amino acid level or nucleic acid level to the sequence used for comparison.

[0282] Sequence identity is typically measured using sequence analysis software (for example, Sequence Analysis Software Package of the Genetics Computer Group, University of Wisconsin Biotechnology Center, 1710 University Avenue, Madison, Wis. 53705, BLAST, BESTFIT, GAP, or PILEUP/PRETTYBOX programs). Such software matches identical or similar sequences by assigning degrees of homology to various substitutions, deletions, and/or other modifications. Conservative substitutions typically include substitutions within the following groups: glycine, alanine; valine, isoleucine, leucine; aspartic acid, glutamic acid, asparagine, glutamine; serine, threonine; lysine, arginine; and phenylalanine, tyrosine.

[0283] Nucleic acid molecules useful in the methods of the disclosure include any nucleic acid molecule that encodes a polypeptide of the disclosure or a functional fragment thereof. Such nucleic acid molecules need not be 100% identical with an endogenous nucleic acid sequence but will typically exhibit substantial identity. Polynucleotides having “substantial identity” to an endogenous sequence are typically capable of hybridizing with at least one strand of a double-stranded nucleic acid molecule. Nucleic acid molecules useful in the methods of the disclosure include any nucleic acid molecule that encodes a polypeptide of the disclosure or a functional fragment thereof. Such nucleic acid molecules need not be 100% identical with an endogenous nucleic acid sequence but will typically exhibit substantial identity. Polynucleotides having “substantial identity” to an endogenous sequence are typically capable of hybridizing with at least one strand of a double-stranded nucleic acid molecule. By “hybridize” is meant pair to form a double-stranded molecule between complementary polynucleotide sequences (e.g., a gene described herein), or portions thereof, under various conditions of stringency. (See, e.g., Wahl, G. M. and S. L. Berger (1987) Methods Enzymol. 152:399; Kimmel, A. R. (1987) Methods Enzymol. 152:507).

[0284] The term “target site” refers to a nucleotide sequence or nucleobase of interest within a nucleic acid molecule that is modified. In embodiments, the modification is deamination of a base. The deaminase can be a cytidine or an adenine deaminase. The fusion protein or base editing complex comprising a deaminase may comprise a dCas9-adenosine deaminase fusion protein, a Cas12b-adenosine deaminase fusion, or a base editor disclosed herein.

[0285] As used herein, the terms “treat,” treating,” “treatment,” and the like refer to reducing or ameliorating a disorder and/or symptoms associated therewith or obtaining a desired pharmacologic and/or physiologic effect. It will be appreciated that, although not precluded, treating a disorder or condition does not require that the disorder, condition or symptoms associated therewith be completely eliminated. In some embodiments, the effect is therapeutic, i.e., without limitation, the effect partially or completely reduces, diminishes, abrogates, abates, alleviates, reduces the intensity of, or cures a disease and/or adverse symptom attributable to the disease. In some embodiments, the effect is preventative, i.e., the effect protects or prevents an occurrence or reoccurrence of a disease or condition. To this end, the presently disclosed methods comprise administering a therapeutically effective amount of a composition as described herein.

[0286] By “transthyretin (TTR) polypeptide” is meant a polypeptide or fragment thereof having at least about 95% amino acid sequence identity to an amino acid sequence provided at NCBI Reference Sequence No. NP_000362.1, or a fragment thereof, that binds an anti-TTR antibody. In some embodiments, a TTR polypeptide or fragment thereof has holo-retinol-binding protein (RBP) and/or thyroxine (T4) transport activity. Typically, amino acid locations for mutations to the TTR polypeptide are numbered with reference to the mature TTR polypeptide (i.e., the TTR polypeptide without a signal sequence). In embodiments, TTR is capable of forming a tetramer. An exemplary TTR polypeptide sequence follows (the signal peptide sequence is in bold; therefore, the mature TTR polypeptide corresponds to amino acids 21 to 147 of the following sequence):

(SEQ ID NO: 464)
MASHRLLLLCLAGLVFVSEAGPTGTGESKCPLMVKVLDAVRGSPAINVAV
HVFRKAADDTWEPFASGKTSESGELHGLTTEEEFVEGIYKVEIDTKSYWK
ALGISPFHEHAEVVFTANDSGPRRYTIAALLSPYSYSTTAVVTNPKE.

[0287] By “transthyretin (TTR) polynucleotide” is meant a nucleic acid molecule that encodes a TTR, as well as the introns, exons, 3′ untranslated regions, 5′ untranslated regions, and regulatory sequences associated with its expression, or fragments thereof. In embodiments, the regulatory sequence is a promoter region. In embodiments, a TTR polynucleotide is the genomic sequence, cDNA, mRNA, or gene associated with and/or required for TTR expression. An exemplary TTR polynucleotide sequence (corresponding to Consensus Coding Sequence (CCDS) No. 11899.1) is provided below. Further exemplary TTR polynucleotide sequences include Gene Ensembl ID: ENSG00000118271 and Transcript Ensembl ID: ENST00000237014.8.

(SEQ ID NO: 465)
ATGGCTTCTCATCGTCTGCTCCTCCTCTGCCTTGCTGGACTGGTATTTGT
GTCTGAGGCTGGCCCTACGGGCACCGGTGAATCCAAGTGTCCTCTGATGG
TCAAAGTTCTAGATGCTGTCCGAGGCAGTCCTGCCATCAATGTGGCCGTG
CATGTGTTCAGAAAGGCTGCTGATGACACCTGGGAGCCATTTGCCTCTGG
GAAAACCAGTGAGTCTGGAGAGCTGCATGGGCTCACAACTGAGGAGGAAT
TTGTAGAAGGGATATACAAAGTGGAAATAGACACCAAATCTTACTGGAAG
GCACTTGGCATCTCCCCATTCCATGAGCATGCAGAGGTGGTATTCACAGC
CAACGACTCCGGCCCCCGCCGCTACACCATTGCCGCCCTGCTGAGCCCCT
ACTCCTATTCCACCACGGCTGTCGTCACCAATCCCAAGGAATGA.

[0288] A further exemplary TTR polynucleotide sequence is provided at NCBI Reference Sequence No. NG_009490.1 and follows (where exons encoding the TTR polypeptide are in bold, introns are in italics, and exemplary promoter regions are indicated by the combined underlined and bold-underlined text (promoter positions −1 to −177) and by the bold-underlined text (promoter positions −106 to −176); further exemplary promoter regions are shown in FIGS. 37A, 37B, 40A, and 40B):

(SEQ ID NO: 466)
TTATGTGTTTATTCAACAATGGCGGAGGAGAGGCATGCCAGATAAGGCAGACACGGGCATTC
CAAACACAAGAAAGGTATGTGCTGCAGAGAAGTCAGATAACTTTCCTAGGCTCTCCTGCAGT
CCGGATGAAATACTCTCAAAAAATTAGCCCGGGCCCTTTGCTCCAATTTTTCGCTTACCTAG
CAACCATCTAACTATTAATTAAATTGGTATTATGGTTTTAACATGAATCTTTTATGATTTGC
TTACCATTAATCAAACCCCCGAGGCTTATTCACCTCAAGGGGAGCTGACAAAGTTGAATTAT
TCAACCTGCAAAGATCCAGGGCCCCCAAATACTGTCATTTCCACTCTCCCCTAACCCCCACC
ATGAGGCCCAGTCTCAGCACTCGGCCAGCCTATGCCCAACTCGGGGTAATCAGCTTAGACAT
ATTAATATTAGTGGGCATTTCAGTATCAACAGATCACTGTCTAGCAGCTGACAGGCACCCTC
AGAAAATAAACCAAGAAGAAAGGGTTTATCTATAATATCAAAATTTTTCATAGATAAACCTG
CCCATTATAAGGAAGAGGGCAGAAGAACCCTAAACTAAGAGCCAGGCAACTTGTTCATTAAT
CACAGCATATTCCATAGAAGGAGGAGAAATGTTGTCATCAAATTCATCTTTTTCACCTCAAT
TAAACATCTATGCTACAGCTCCACAGTCAGATTGAGAGGAAAAACAGTACGTAGCTAAGAAA
AGACATAGACTTGTAACTGAAATGCTTCACTGGTGCTCCTTTTGTTTTAAGGCATTGGATCT
TCATAGCTACTGATCGTGCCCAAGCACACAGTATCTGCAGCAACCACTTAGGCCTCCAGGAA
TGTGGTGACCATTGACCCTAATTCATTCCCCTTCATGGATCCTATGTAACCATCCTCCAAAA
AGAGCTTTCGCAAACTCAAATAAACACAGGAAAGGAAGACCTTCTTATCTTTGAGAGTATAT
GTTTAGCCCTATAACCCTCTCTTATCATAAATTGCTTCTTAGGCAAGAAACACTGGATTTTT
CTTGTATTTGTCATTGCCATTGGTTCCATACAAGCATTCATTTAACAAATAATACATTCCAT
CTCCGTTTTTTGCTTTTTCCTTCATGCTTCGGCCTTGGTTTTCTCTCACCTAAAACACTACA
AGCTTCTTCTCCCAGAGCTCTCACTTTGACTCCAGACTACCTACATTTAATCTTTAATTCTC
TACCAAAATTTTCTCTTATCTTTATATCTTTTTAATTTTAATTTTATTTTTTGTGGATACAT
AGTAGGTGTATATATTTATGGGGTACATGCAATGTTTTAATACAGGCATGCAATGTGAAATA
AGGACATCATGGAGAATGGGGTATCCATCTCCTCAAGCATTTATCTTTTCAGTTACAAACAA
TCCAATTACACTCTTTATTTTAAAATATACAATTATTAATTATAGTCACTCTGTTGTGCTAT
CAAATAGTAGATCTTATTCTTTCTATTTTTTGTACCCTCTCGTCTTTTTATATTAAAAAATA
ATCTTTATCTCTGTAAGCTTCATCAGTGATTTTCCAATGAAATTTAGGATCTTCTCTATACC
CTGAATTGCCTTACTTTCTCCCCACTTCCTTGTCTTATTCAAATGCAGATTTCATTAATGAT
TTCCAGATCAATGATAGTTCAGAAAGCAAGCAAGTCAAAGTGACCAAGGGCATGGCCTGAAA
ACTGTTCTAAGAGAGGAATTTACAGAACAACTATTAAATGATGTCAATAGGATTGTATTAGT
CCGTTTTCATACGGCTATAAAGAACTGCCTGAGACTGGGTAATTTATAAAGGAAAGAGGTTT
AATTGACTCACAGTTCAGCACAACTGGGCAGGCCTCAGGAAACTTACAATCATGGTAGAAGG
TGAAGGGGAAGCAAAGCACCTTCCTCACAAGGCGTCAGGAAGAAGTGCCAAGCAAAGGGGGA
AAAGCCCCTTGTAAAACTACCAGAACCTGTGAGAACTCAATCACTATCACAAGAACAGCATG
AGGGAACCGCCCCTCGTGATTCAATTACCTCCACCTGGTCTCTCCCTTGACACATGGGGATT
ATGGGTGTTACAATTCAAGATGAGATTTGGGTGGGGACACAAAGCCTAACCATATCAAGGAT
CAAGTGGTGGGTTGAAACTAACAGGATGAGATATATCAGATACAAACACAGGGTCCCATATT
TGGGTTAAAATTCATAAATGATCAAAGCACAGGATGACAGATAATATAGGTCATTTTAGATT
ATTGTGGCCAACAGATCACAGTGGGTAGTGTTATGACGAAGGGAGGGTCACAGTTACTACAG
TTACAGATGGATTCTGGGTACAACATTTGCACTAAAGTGCCTTTGCCAAGGGAGGCAACAGT
CTCGACATCCTGTGGCCTGATCTACTTCAGGGACTGTGTCTTGTTCAGAGCATCACATTTGA
AGAGAACTTTGACCAAGGGGAATATGCCAGAAAAGGAAGTTCGGGATGCTGAGGATCTTAGG
AACTATGTCTAAACAAGATTCATTCACAGAAGTGGGAATGTCTATTTGGCAAAAAGAAAATA
CTACTTACATGGCTGTTGGAAGACCAGCAATCACAAACTCAGTTTTTCAAAAGGCTGGGCAG
AAACACAGATGAAAGAAACAGGCCATGTTTAAGAAAAGATAAAAGCTCACGCATGATATGCC
ACTAGAGAATCACCTAGCCTCAGTGTTGGCGGGGAGGCCTGGGGAGTCTTGATGTCTGAGAG
TGACATTCTGATGATCACTGTCATGTGTAAATGTTGGCCTAAAGCTGCCAATATTTTTGATT
TAAGAGAAGCAAGAAATGCAAATTTTTATGCAGCATGTCTCAATTTTTAATTTTGGCAACTA
TTACAAAATGTTTAAAGAGACTCTGTGCAGCCCAAATATAACATATCTATGGGCTGATGGCA
GCCCAGCGTTGCCAGTTCACAGGGTCTACAAGAGATGATTCTTAGTTTCAACAGGGTGCAGT
GCTGAAACGCGTGCACAGTAGATTTTGCTTCGGTTATGAAAGAACTTCCAAATATTTATGAT
TCATAGCCAGAGAAAAGGCTCTCTATCCAGGTTCTGAACAATAGGAAATCATCAAGAGGATA
TTGGATGACAATATATGAAAGATGTTATTTGAGAAAGGATTCTCTCCTGAGGCATAGATGTT
GAACCAAATTCTATTAGTTATGCTTTTACAGCAAGATAGTGGTTTACAGCTTACAAAAGGCT
TGTACATCCTCTCATATTAAAAGTTATTAGAACAGTCCTTTGAAGTAGAAAAGTAGGCATTT
CTATTTTACAAACGAGTTGGCCGAGTATCTGAGATAGTAGATAACTCATAGAAGGTCATCCG
GGAAACGGGGCAGCAGAACTGGGATCGAATGACTCTGGTCATCCAACTCCAAATGCAAAAGT
CTTTCTGCTGCTGCTTCCTAGTTAAACTCTAAGGGTCTAAGACTCCATTCCTAGTTATGGTC
TCAACTACATTTGCTCATTGCTGTGAGGGGTCAACCCACCTCCCGGAGTCCTCTCCTGCACA
TTCTCATGTTCCTGAAAGGCTTTTCTGTCCCTTCCACTACTCCCTGTAAGCTCCTGTGCTTC
ACAATTTCTTGTTGAATTTTTTCTAATCTGACTCTATCAGTTATGGGAATGTTCCCTCAATT
CTTAGTGCTCCAAACCGGACTTGCTCTTGGCTTGTATTTGTCCAAAATATTTGTCTTCTCTA
TGTTTTCTACATGTTTGTCTTATAAGGACAAAAACCTGCCTTAGTTTATCCATGAACAAAGC
CACGCATGCTAGTGGACACACACACACATGCGCGTGCGCGCGCACACACACACACACACACA
TACACACAGAGACTTTGTATGTGAGTAATGAATCATCAAATCATCATAATTTCTGGACTTGT
ATTAATAAGTCGGCCAGGAGGAAAAGAATCTGCTGTCAATCATGGCTTCTGGTTCTCACAGT
CATCTCTACTTTCTTCCAGCAAGTTTGGTTCTGTCAAAAACCAGCTGTCAGCCTTGTTCCTG
CATGCCCAATGCAGAAGAGTCAGTAAAGAAGATTTGGTTCTCTGTATTTCAGGGGCATCAAT
GCCAGGTTGAAATATGCCATTCTGGCCCAGCTCAGTGGCTCACACGTGTAATCCCAGCACTT
TGGAAGGCCAAAGCGGGTGGATTGCTTGAGCTCAGGAGTTCGAGACCAGCCTGGGCAAGAGG
CTGAGGTGGGAGGATGACCTGAGCCCGGGAGGTCAAGGCTGCAGCGAGCTGTGATCGTGCCA
CTGCACTCGAGCCAGGGCGTTGGAGTGAGACCCTGTCAAAAAAAAAAAAAAAAAGGAAGGAA
AAAAGGAAGGAAGGAAGGGAGGGAGGGAAGATGCCATTCTTAGATTGAAGTGGACTTTATCT
GGGCAGAACACACACACACATACACACATGCACACACACATTGTGGAGAAATTGCTGACTAA
GCAAAGCTTCCAAATGACTTAGTTTGGCTAAAATGTAGGCTTTTAAAAATGTGAGCACTGCC
AAGGGTTTTTCCTTGTTGACCCATGGATCCATCAAGTGCAAACATTTTCTAATGCACTATAT
TTAAGCCTGTGCAGCTAGATGTCATTCAACATGAAATACATTATTACAACTTGCATCTGTCT
AAAATCTTGCATCTAAAATGAGAGACAAAAAATCTATAAAAATGGAAAACATGCATAGAAAT
ATGTGAGGGAGGAAAAAATTACCCCCAAGAATGTTAGTGCACGCAGTCACACAGGGAGAAGA
CTATTTTTGTTTTGTTTTGATTGTTTTGTTTTGTTTTGGTTGTTTTGTTTTGGTGACCTAAC
TGGTCAAATGACCTATTAAGAATATTTCATAGAACGAATGTTCCGATGCTCTAATCTCTCTA
GACAAGGTTCATATTTGTATGGGTTACTTATTCTCTCTTTGTTGACTAAGTCAATAATCAGA
ATCAGCAGGTTTGCAGTCAGATTGGCAGGGATAAGCAGCCTAGCTCAGGAGAAGTGAGTATA
AAAGCCCCAGGCTGGGAGCAGCCATCACAGAAGTCCACTCATTCTTGGCAGGATGGCTTCTC
ATCGTCTGCTCCTCCTCTGCCTTGCTGGACTGGTATTTGTGTCTGAGGCTGGCCCTACGGTG
AGTGTTTCTGTGACATCCCATTCCTACATTTAAGATTCACGCTAAATGAAGTAGAAGTGACT
CCTTCCAGCTTTGCCAACCAGCTTTTATTACTAGGGCAAGGGTACCCAGCATCTATTTTTAA
TATAATTAATTCAAACTTCAAAAAGAATGAAGTTCCACTGAGCTTACTGAGCTGGGACTTGA
ACTCTGAGCATTCTACCTCATTGCTTTGGTGCATTAGGTTTGTAATATCTGGTACCTCTGTT
TCCTCAGATAGATGATAGAAATAAAGATATGATATTAAGGAAGCTGTTAATACTGAATTTTC
AGAAAAGTATCCCTCCATAAAATGTATTTGGGGGACAAACTGCAGGAGATTATATTCTGGCC
CTATAGTTATTCAAAACGTATTTATTGATTAATCTTTAAAAGGCTTAGTGAACAATATTCTA
GTCAGATATCTAATTCTTAAATCCTCTAGAAGAATTAACTAATACTATAAAATGGGTCTGGA
TGTAGTTCTGACATTATTTTATAACAACTGGTAAGAGGGAGTGACTATAGCAACAACTAAAA
TGATCTCAGGAAAACCTGTTTGGCCCTATGTATGGTACATTACATCTTTTCAGTAATTCCAC
TCAAATGGAGACTTTTAACAAAGCAACTGTTCTCAGGGGACCTATTTTCTCCCTTAAAATTC
ATTATACACATCCCTGGTTGATAGCAGTGTGTCTGGAGGCAGAAACCATTCTTGCTTTGGAA
ACAATTACGTCTGTGTTATACTGAGTAGGGAAGCTCATTAATTGTCGACACTTACGTTCCTG
ATAATGGGATCAGTGTGTAATTCTTGTTTCGCTCCAGATTTCTAATACCACAAAGAATAAAT
CCTTTCACTCTGATCAATTTTGTTAACTTCTCACGTGTCTTCTCTACACCCAGGGCACCGGT
GAATCCAAGTGTCCTCTGATGGTCAAAGTTCTAGATGCTGTCCGAGGCAGTCCTGCCATCAA
TGTGGCCGTGCATGTGTTCAGAAAGGCTGCTGATGACACCTGGGAGCCATTTGCCTCTGGGT
AAGTTGCCAAAGAACCCTCCCACAGGACTTGGTTTTATCTTCCCGTTTGCCCCTCACTTGGT
AGAGAGAGGCTCACATCATCTGCTAAAGAATTTACAAGTAGATTGAAAAACGTAGGCAGAGG
TCAAGTATGCCCTCTGAAGGATGCCCTCTTTTTGTTTTGCTTAGCTAGGAAGTGACCAGGAA
CCTGAGCATCATTTAGGGGCAGACAGTAGAGAAAAGAAGGAATCAGAACTCCTCTCCTCTAG
CTGTGGTTTGCAACCCTTTTGGGTCACAGAACACTTTATGTAGGTGATGAAAAGTAAACATT
CTATGCCCAGAAAAAATGCACAGATACACACACATACAAAATCATATATGTGATTTTAGGAG
TTTCACAGATTCCCTGGTGTCCCTGGGTAACACCAAAGCTAAGTGTCCTTGTCTTAGAATTT
TAGGAAAAGGTATAATGTGTATTAACCCATTAACAAAAGGAAAGGAATTCAGAAATATTATT
AACCAGGCATCTGTCTGTAGTTAATATGGATCACCCAAAACCCAAGGCTTTTGCCTAATGAA
CACTTTGGGGCACCTACTGTGTGCAAGGCTGGGGGCTGTCAAGCTCAGTTAAAAAAAAAAAG
ATAGAAGAGATGGATCCATGAGGCAAAGTACAGCCCCAGGCTAATCCCACGATCACCCGACT
TCATGTCCAAGAGTGGCTTCTCACCTTCATTAGCCAGTTCACAATTTTCATGGAGTTTTTCT
ACCTGCACTAGCAAAAACTTCAAGGAAAATACATATTAATAAATCTAAGCAAAGTGACCAGA
AGACAGAGCAATCAGGAGACCCTTTGCATCCAGCAGAAGAGGAACTGCTAAGTATTTACATC
TCCACAGAGAAGAATTTCTGTTGGGTTTTAATTGAACCCCAAGAACCACATGATTCTTCAAC
CATTATTGGGAAGATCATTTTCTTAGGTCTGGTTTTAACTGGCTTTTTATTTGGGAATTCAT
TTATGTTTATATAAAATGCCAAGCATAACATGAAAAGTGGTTACAGGACTATTCTAAGGGAG
AGACAGAATGGACACCAAAAATATTCCAATGTTCTTGTGAATCTTTTCCTTGCACCAGGACA
AAAAAAAAAAGAAGTGAAAAGAAGAAAGGAGGAGGGGCATAATCAGAGTCAGTAAAGACAAC
TGCTATTTTTATCTATCGTAGCTGTTGCAGTCAAATGGGAAGCAATTTCCAACATTCAACTA
TGGAGCTGGTACTTACATGGAAATAGAAGTTGCCTAGTGTTTGTTGCTGGCAAAGAGTTATC
AGAGAGGTTAAATATATAAAAGGGAAAAGAGTCAGATACAGGTTCTTCTTCCTACTTTAGGT
TTTCCACTGTGTGTGCAAATGATACTCCCTGGTGGTGTGCAGATGCCTCAAAGCTATCCTCA
CACCACAAGGGAGAGGAGCGAGATCCTGCTGTCCTGGAGAAGTGCAGAGTTAGAACAGCTGT
GGCCACTTGCATCCAATCATCAATCTTGAATCACAGGGACTCTTTCTTAAGTAAACATTATA
CCTGGCCGGGCACGGTGGCTCACGCCTGTAATCCCAGCACTTTGGGATGCCAAAGTGGGCAT
ATCATCTGAGGTCAGGAGTTCAAGACCAGCCTGGCCAACATGGCAAAACTCCGTCTTTATGA
AAAATACAAAAATTAGCCAGGCATGGTGGCAGGCGCCTGTAATCCCAGCTAATTGGGAGGCT
GAGGCTGGAGAATCCCTTGAATCTAGGAGGCAGAGGTTGCAGTGAGCTGAGATCGTGCCATT
GCACTCCAGCCTGGGTGACAAGAGTAAAACTCTGTCTCAAAAAAAAAAAATTATACCTACAT
TCTCTTCTTATCAGAGAAAAAAATCTACAGTGAGCTTTTCAAAAAGTTTTTACAAACTTTTT
GCCATTTAATTTCAGTTAGGAGTTTTCCCTACTTCTGACTTAGTTGAGGGGAAATGTTCATA
ACATGTTTATAACATGTTTATGTGTGTTAGTTGGTGGGGGTGTATTACTTTGCCATGCCATT
TGTTTCCTCCATGCGTAACTTAATCCAGACTTTCACACCTTATAGGAAAACCAGTGAGTCTG
GAGAGCTGCATGGGCTCACAACTGAGGAGGAATTTGTAGAAGGGATATACAAAGTGGAAATA
GACACCAAATCTTACTGGAAGGCACTTGGCATCTCCCCATTCCATGAGCATGCAGAGGTGAG
TATACAGACCTTCGAGGGTTGTTTTGGTTTTGGTTTTTGCTTTTGGCATTCCAGGAAATGCA
CAGTTTTACTCAGTGTACCACAGAAATGTCCTAAGGAAGGTGATGAATGACCAAAGGTTCCC
TTTCCTATTATACAAGAAAAAATTCACAACACTCTGAGAAGCAAATTTCTTTTTGACTTTGA
TGAAAATCCACTTAGTAACATGACTTGAACTTACATGAAACTACTCATAGTCTATTCATTCC
ACTTTATATGAATATTGATGTATCTGCTGTTGAAATAATAGTTTATGAGGCAGCCCTCCAGA
CCCCACGTAGAGTGTATGTAACAAGAGATGCACCATTTTATTTCTCGAAAACCCGTAACATT
CTTCATTCCAAAACACATCTGGCTTCTCGGAGGTCTGGACAAGTGATTCTTGGCAACACATA
CCTATAGAGACAATAAAATCAAAGTAATAATGGCAACACAATAGATAACATTTACCAAGCAT
ACACCATGTGGCAGACACAATTATAAGTGTTTTCCATATTTAACCTACTTAATCCTCAGGAA
TAAGCCACTGAGGTCAGTCCTATTATTATCCCCATCTTATAGATGAAGAAAATGAGGCACCA
GGAAGTCAAATAACTTGTCAAAGGTCACAAGACTAGGAAATACACAAGTAGAAATGTTTACA
ATTAAGGCCCAGGCTGGGTTTGCCCTCAGTTCTGCTATGCCTCGCATTATGCCCCAGGAAAC
TTTTTCCCTTGTGAAAGCCAAGCTTAAAAAAAGAAAAGCCACATTTGTAACGTGCTCTGTTC
CCCTGCCTATGGTGAGGATCTTCAAACAGTTATACATGGACCCAGTCCCCCTGCCTTCTCCT
TAATTTCTTAAGTCATTTGAAACAGATGGCTGTCATGGAAATAGAATCCAGACATGTTGGTC
AGAGTTAAAGATCAACTAATTCCATCAAAAATAGCTCGGCATGAAAGGGAACTATTCTCTGG
CTTAGTCATGGATGAGACTTTCAATTGCTATAAAGTGGTTCCTTTATTAGACAATGTTACCA
GGGAAACAACAGGGGTTTGTTTGACTTCTGGGGCCCACAAGTCAACAAGAGAGCCCCATCTA
CCAAGGAGCATGTCCCTGACTACCCCTCAGCCAGCAGCAAGACATGGACCCCAGTCAGGGCA
GGAGCAGGGTTTCGGCGGCGCCCAGCACAAGACATTGCCCCTAGAGTCTCAGCCCCTACCCT
CGAGTAATAGATCTGCCTACCTGAGACTGTTGTTTGCCCAAGAGCTGGGTCTCAGCCTGATG
GGAACCATATAAAAAGGTTCACTGACATACTGCCCACATGTTGTTCTCTTTCATTAGATCTT
AGCTTCCTTGTCTGCTCTTCATTCTTGCAGTATTCATTCAACAAACATTAAAAAAAAAAAAA
AGCATTCTATGTGTGGAACACTCTGCTAGATGCTGTGGATTTAGAAATGAAAATACATCCCG
ACCCTTGGAATGGAAGGGAAAGGACTGAAGTAAGACAGATTAAGCAGGACCGTCAGCCCAGC
TTGAAGCCCAGATAAATACGGAGAACAAGAGAGAGCGAGTAGTGAGAGATGAGTCCCAATGC
CTCACTTTGGTGACGGGTGCGTGGTGGGCTTCATGCAGCTTCTTCTGATAAATGCCTCCTTC
AGAACTGGTCAACTCTACCTTGGCCAGTGACCCAGGTGGTCATAGTAGATTTACCAAGGGAA
AATGGAAACTTTTATTAGGAGCTCTTAGGCCTCTTCACTTCATGGATTTTTTTTTCCTTTTT
TTTTGAGATGGAGTTTTGCCCTGTCACCCAGGCTGGAATGCAGTGGTGCAATCTCAGCTCAC
TGCAACCTCCGCCTCCCAGGTTCAAGCAATTCTCCTGCCTCAGCCTCCCGAGTAGCTGGGAC
TACAGGTGTGCGCCACCACACCAGGCTAATTTTTGTATTTTTTGTAAAGACAGGTTTTCACC
ACGTTGGCCAGGCTGGTCTGAACTCCAGACCTCAGGTGATTCACCTGTCTCAGCCTCCCAAA
GTGCTGGGATTACAGGTGTGAGCCACCGTGCCCGGCTACTTCATGGATTTTTGATTACAGAT
TATGCCTCTTACAATTTTTAAGAAGAATCAAGTGGGCTGAAGGTCAATGTCACCATAAGACA
AAAGACATTTTTATTAGTTGATTCTAGGGAATTGGCCTTAAGGGGAGCCCTTTCTTCCTAAG
AGATTCTTAGGTGATTCTCACTTCCTCTTGCCCCAGTATTATTTTTGTTTTTGGTATGGCTC
ACTCAGATCCTTTTTTCCTCCTATCCCTAAGTAATCCGGGTTTCTTTTTCCCATATTTAGAA
CAAAATGTATTTATGCAGAGTGTGTCCAAACCTCAACCCAAGGCCTGTATACAAAATAAATC
AAATTAAACACATCTTTACTGTCTTCTACCTCTTTCCTGACCTCAATATATCCCAACTTGCC
TCACTCTGAGAACCAAGGCTGTCCCAGCACCTGAGTCGCAGATATTCTACTGATTTGACAGA
ACTGTGTGACTATCTGGAACAGCATTTTGATCCACAATTTGCCCAGTTACAAAGCTTAAATG
AGCTCTAGTGCATGCATATATATTTCAAAATTCCACCATGATCTTCCACACTCTGTATTGTA
AATAGAGCCCTGTAATGCTTTTACTTCGTATTTCATTGCTTGTTATACATAAAAATATACTT
TTCTTCTTCATGTTAGAAAATGCAAAGAATAGGAGGGTGGGGGAATCTCTGGGCTTGGAGAC
AGGAGACTTGCCTTCCTACTATGGTTCCATCAGAATGTAGACTGGGACAATACAATAATTCA
AGTCTGGTTTGCTCATCTGTAAATTGGGAAGAATGTTTCCAGCTCCAGAATGCTAAATCTCT
AAGTCTGTGGTTGGCAGCCACTATTGCAGCAGCTCTTCAATGACTCAATGCAGTTTTGCATT
CTCCCTACCTTTTTTTTCTAAAACCAATAAAATAGATACAGCCTTTAGGCTTTCTGGGATTT
CCCTTAGTCAAGCTAGGGTCATCCTGACTTTCGGCGTGAATTTGCAAAACAAGACCTGACTC
TGTACTCCTGCTCTAAGGACTGTGCATGGTTCCAAAGGCTTAGCTTGCCAGCATATTTGAGC
TTTTTCCTTCTGTTCAAACTGTTCCAAAATATAAAAGAATAAAATTAATTAAGTTGGCACTG
GACTTCCGGTGGTCAGTCATGTGTGTCATCTGTCACGTTTTTCGGGCTCTGGTGGAAATGGA
TCTGTCTGTCTTCTCTCATAGGTGGTATTCACAGCCAACGACTCCGGCCCCCGCCGCTACAC
CATTGCCGCCCTGCTGAGCCCCTACTCCTATTCCACCACGGCTGTCGTCACCAATCCCAAGG
AATGAGGGACTTCTCCTCCAGTGGACCTGAAGGACGAGGGATGGGATTTCATGTAACCAAGA
GTATTCCATTTTTACTAAAGCAGTGTTTTCACCTCATATGCTATGTTAGAAGTCCAGGCAGA
GACAATAAAACATTCCTGTGAAAGGCACTTTTCATTCCACTTTAACTTGATTTTTTAAATTC
CCTTATTGTCCCTTCCAAAAAAAAGAGAATCAAAATTTTACAAAGAATCAAAGGAATTCTAG
AAAGTATCTGGGCAGAACGCTAGGAGAGATCCAAATTTCCATTGTCTTGCAAGCAAAGCACG
TATTAAATATGATCTGCAGCCATTAAAAAGACACATTCTGTAAATGAGAGAGCCTTATTTTC
CTGTAACCTTCAGCAAATAGCAAAAGACACATTCCAAGGGCCCACTTCTTTACTGTGGGCAT
TTCTTTTTTTTTCTTTTTTTCTTTTTTCCTTTTTTGAGACAAAGTCTCACTCTGTTGCCCAG
GCTAGAATGCAGTGGTGTAATCTCAGCTCACTGCAACCTCTGCTTCCTGGGTTCAAGCGATT
CTCCTGCCTCAGCCTCCCAAGTAACTGGGATTACAGGCGCATGCCACCACGCCTAGCTCATT
TTTGTATTTTTAGTAGAGATGGGATTTTGCCATGTTGGCTAGGCTGGTCTACGAACTCCTGA
CCTCAGGTGATCCACCTGCCTCAGCCTCCCAAAGTGCTGGGATTACAGGCATGAGCCACTAC
ACCCGGCCCCTACTCTGGGCATTTCTTTGATTAAAGAGAAGGGGAGCTCCAACAAGATACAC
CTGCAGCAACTCAGGCCGTCTGATCAGTTCAGGCCAGATCTACACTGCAACCAGCCAGGTCA
GGGGAAAACCAAAGAACCCCACACACCCAATTTACTTAGGCTGATCCAAAATCCATGTATGG
AGAACTCACATGCACCAGGCACTATTTTAGGTGAACTGAATATAAAGAATAGGACCCAGTAC
CTGCATTTACTTAAAGAACTCACAATCTTTTGAGAACATAACTGTTTCATCATGGTTTGGCA
GGAGGCTATGGTACAAGGCACAGCAAGGGTAAGAAGGAGGAAGAAACCAACACCCTACAGAA
ATCAGGGAATGACTCTGAATAGGTGTCACTTAATCTGAGTGTTGGTAATTTGTCAGATAGAC
AAGGGAAAAGGTATTCTAGGTAGAGAGAATACAGTTTGCAAGGCCCAGCCAAGTGAAACAAT
TTGATAAGTTGAGAGAGCAGACGACGATTCAGAATGTTGAAGGGCAAAGGTATTGAGGTGGG
ATGGGTTATGCTGCTATCACAAATAACCCCAAATCTCGGGGGCTTAACAAAGTAAAAGTTTA
GTCTCAGTTGTGCCAGGTCCAATGTAGAACTCTTTGCTCTAGAGACTCTTTAGGGTGGCTTT
CCTTCTAATGGTGACTGTTTGAGACAGTTTGATTTAGTCTTGTGGCTTCAAGGTCACTCTGG
TGATATTTAGCCAGCAGACTGAGGGAACATAGTATGGTATTAGACCCCTCTGTGCTGAAGTG
TCACACATGAGTCCCATTGACTTCTCACTGGCCAGAGCTAGTTACATGCCCCCATCTAGATG
TGCTGAGAAATGTGGCCCCTGGCTGGGAGCCATTTCCCAGAACAACTAACTCTATGCTCTGG
AAGAGGAGCACTAATCTGAGTTGGCCAACAACCATCTCTACCACAGTAGGGTTGGGACTGGT
GGGGCATGAGGCTGGAGTGAAGGTTGGTTTTATCTGCCACGCGTTACAGCTGTGAATTTGTC
TTGAAAGCAACATGGGTCCATTGAAGGGAACCTTGACATCAGTCATGTGGCTGGGACAAGAA
TAGTTACCACTTGCCCGTAATCTCCAACCAGGATTCTCCAGGAGAACCTGAGTTAGACACAT
GGCTTAGGCCTAAACCTACCTGAGTGGTCTTTCTATTTTCCTCCAAATTCAAATCTCAAATC
TTGCTACCCTCTAACTGGCTATGTTGAGAGAGGAAAAAACTTGAAGAGAATGCAGTGTAGCT
TTGGAGTTTTTCACATGCACTTTTCCCAAGATACATAGCAAAATCAATGTCTCCAATTCTAT
TAATGTTGTTAGCAAGTCCTTGTTCCATGCATATTGGTTAATCCATAGCAAATTGCCATTTT
TATAGACTAAATGGTCAAATATTGGCAATTTCATAAGGTTCAGTCTATTACCTACCATGATT
GTATTGGTCACTAACCTGCCTATTTTTAGAATGCTACATATTCATTTGGCTGTTGTTAAATA
GCTATGGATTTTTATAATCAAAACAGGTTGAAAATATGAATCAGTTTAAAACCACATACA.

[0289] In the above TTR polynucleotide sequence provided at NCBI Reference Sequence No. NG_009490.1, exons encoding the TTR polypeptide correspond to the union of nucleotides 5137 . . . 5205, 6130 . . . 6260, 8354 . . . 8489, and 11802 . . . 11909, and the intervening sequences correspond to intron sequences. The union of nucleotides 5137 . . . 5205, 6130 . . . 6260, 8354 . . . 8489, and 11802 . . . 11909 corresponds to Consensus Coding Sequence (CCDS) No. 11899.1.

[0290] By “transthyretin amyloidosis” is meant a disease associated with an accumulation of amyloid in a tissue of a subject.

[0291] By “uracil glycosylase inhibitor” or “UGI” is meant an agent that inhibits the uracil-excision repair system. Base editors comprising a cytidine deaminase convert cytosine to uracil, which is then converted to thymine through DNA replication or repair. In various embodiments, a uracil DNA glycosylase (UGI) prevent base excision repair which changes the U back to a C. In some instances, contacting a cell and/or polynucleotide with a UGI and a base editor prevents base excision repair which changes the U back to a C. An exemplary UGI comprises an amino acid sequence as follows:

>splP14739IUNGI_BPPB2 Uracil-DNA glycosylase
inhibitor
(SEQ ID NO: 231)
MTNLSDIIEKETGKQLVIQESILMLPEEVEEVIGNKPESDILVHTAY
DESTDENVMLLTSDAPEYKPWALVIQDSNGENKIKML.

[0292] In some embodiments, the agent inhibiting the uracil-excision repair system is a uracil stabilizing protein (USP). See, e.g., WO 2022015969 A¹, incorporated herein by reference.

[0293] As used herein, the term “vector” refers to a means of introducing a nucleic acid molecule into a cell, resulting in a transformed cell. Vectors include plasmids, transposons, phages, viruses, liposomes, lipid nanoparticles, and episomes.

[0294] Ranges provided herein are understood to be shorthand for all of the values within the range. For example, a range of 1 to 50 is understood to include any number, combination of numbers, or sub-range from the group consisting 1, 2, 3, 4, 5, 6, 7, 8, 9, 10, 11, 12, 13, 14, 15, 16, 17, 18, 19, 20, 21, 22, 23, 24, 25, 26, 27, 28, 29, 30, 31, 32, 33, 34, 35, 36, 37, 38, 39, 40, 41, 42, 43, 44, 45, 46, 47, 48, 49, or 50.

[0295] The recitation of a listing of chemical groups in any definition of a variable herein includes definitions of that variable as any single group or combination of listed groups. The recitation of an embodiment for a variable or aspect herein includes that embodiment as any single embodiment or in combination with any other embodiments or portions thereof.

[0296] All terms are intended to be understood as they would be understood by a person skilled in the art. Unless defined otherwise, all technical and scientific terms used herein have the same meaning as commonly understood by one of ordinary skill in the art to which the disclosure pertains

[0297] In this application, the use of the singular includes the plural unless specifically stated otherwise. It must be noted that, as used in the specification, the singular forms “a,” “an” and “the” include plural referents unless the context clearly dictates otherwise. In this application, the use of “or” means “and/or” unless stated otherwise. Furthermore, use of the term “including” as well as other forms, such as “include”, “includes,” and “included,” is not limiting.

[0298] As used in this specification and claim(s), the words “comprising” (and any form of comprising, such as “comprise” and “comprises”), “having” (and any form of having, such as “have” and “has”), “including” (and any form of including, such as “includes” and “include”) or “containing” (and any form of containing, such as “contains” and “contain”) are inclusive or open-ended. This wording indicates that specified elements, features, components, and/or method steps are present, but does not exclude the presence of other elements, features, components, and/or method steps. Any embodiments specified as “comprising” a particular component(s) or element(s) are also contemplated as “consisting of” or “consisting essentially of” the particular component(s) or element(s) in some embodiments. It is contemplated that any embodiment discussed in this specification can be implemented with respect to any method or composition of the present disclosure, and vice versa. Furthermore, compositions of the present disclosure can be used to achieve methods of the present disclosure.

[0299] The term “about” or “approximately” means within an acceptable error range for the particular value as determined by one of ordinary skill in the art, which will depend in part on how the value is measured or determined, i.e., the limitations of the measurement system.

[0300] Reference in the specification to “some embodiments,” “an embodiment,” “one embodiment” or “other embodiments” means that a particular feature, structure, or characteristic described in connection with the embodiments is included in at least some embodiments, but not necessarily all embodiments, of the present disclosures.

### BRIEF DESCRIPTION OF THE DRAWINGS

[0301] FIGS. 1A, 1B, and 1C. A general schematic of a gene editor complexed with a gRNA targeting a gene of interest. Cas9 protein, guide RNA, Spacer sequence, protospacer sequence, and PAM (protospacer adjacent motif) are identified (FIG. 1A). FIG. 1A discloses SEQ ID NO: 1216. Additionally, schematics of general principles of base editing with cytosine base editors (CBE) (FIG. 1B) and adenine base editors (ABE) (FIG. 1C) are illustrated.

[0302] FIG. 2. Alteration of splice donor sites resulting from base editing. Top panel represents normal splicing of RNA transcribed from a gene. Bottom panel represents splicing that may result from transcription of a gene that has a disrupted splice site due to editing.

[0303] FIG. 3. Map of the human TTR gene (hTTR gene), shows the location of various restriction enzyme recognition sites, Exons 1-4, and the single guide RNAs GA457, GA459, GA460, and GA461 specified in Table 8.

[0304] FIG. 4. Nucleotide sequence of the human TTR gene (UniProtKB-P02766 (TTHY_HUMAN)) from the reference human genome (GRCh38) is shown and depicts the region on the gene where guides GA457, GA459, GA460, and GA461 are located. FIG. 4 discloses SEQ ID NO: 1217.

[0305] FIGS. 5A-5C. A schematic showing TTR guides and editing locations for GA457 (FIG. 5A), GA460 (FIG. 5B), and GA461 (FIG. 5C). Human genomic DNA (gDNA) sequences are labeled in black. Guide sequences are highlighted in grey above. Genomic exon sequences are in uppercase letters and intron sequences are in lowercase letters. The main position targeted by ABE editing is labeled with a black arrow. FIGS. 5A, 5B, and 5C disclose SEQ ID NOs: 467, 1218, 469, 1219, 1220, and 1221, respectively, in order of appearance.

[0306] FIG. 6. is a graph representing the percent splice editing in human hepatocytes using ABE editing with single guide RNAs GA457, GA459, GA460, and GA461 guide RNAs. The three TTR guide RNAs GA457, GA460, and GA461 show high activity in human hepatocytes. Each of the guides employ the identical tracr sequence and differ only by their RNA spacer sequence which corresponds to specified DNA protospacer sequences on the targeted TTR gene.

[0307] FIG. 7 is a flowchart of the ONE-seq protocol for determining candidate off-target sites.

[0308] FIG. 8 is a schematic diagram comparison of GA519 and GA457 hybridized to NHP and Human TTR exon 1. FIG. 8 discloses SEQ ID NOs: 467, 1222, 471, and 1223, respectively, in order of appearance.

[0309] FIG. 9 is a schematic diagram showing a comparison of GA520 and GA460 hybridized to NHP and Human TTR exon 3. FIG. 9 discloses SEQ ID NOs: 1224-1225 and 1224-1225, respectively, in order of appearance.

[0310] FIG. 10 is a bar graph showing hepatic editing of TTR gene by LNP1 and LNP2 in

[0311] Non-Human Primates (NHPs) as described in the Examples.

[0312] FIG. 11 is a bar graph showing serum TTR protein changes as measured by ELISA in NHP treated with LNP1 and LNP2 as described in the Examples.

[0313] FIG. 12 is a bar graph showing serum TTR protein changes as measured by mass spectrometry in NHP treated with LNP1 and LNP2 as described in the Examples.

[0314] FIGS. 13A and 13B are a bar graphs showing serum Alanine Aminotransferase (ALT), FIG. 13A, and serum Aspartate Aminotransferase (AST), FIG. 13B, concentrations in NHP treated with LNP1 and LNP2 as described in the Examples.

[0315] FIGS. 14A and 14B are a bar graphs showing serum Lactate Dehydrogenase (LDH), FIG. 14A, and serum Glutamate Dehydrogenase (GDH), FIG. 14B, concentrations in NHP treated with LNP1 and LNP2 as described in the Examples.

[0316] FIGS. 15A and 15B are a bar graphs showing serum Gamma-Glutamyl Transferase (GGT), FIG. 15A, and serum Alkaline Phosphatase (AP), FIG. 15B, concentrations in NHP treated with LNP1 and LNP2 as described in the Examples.

[0317] FIG. 16 is a bar graph showing serum total bilirubin concentrations in NHP treated with LNP1 and LNP2 as described in the Examples.

[0318] FIG. 17 is a bar graph showing serum creatine kinase concentrations in NHP treated with LNP1 and LNP2 as described in the examples.

[0319] FIG. 18 shows bar graphs of serum cytokine concentrations (MCP-1, upper left panel; IL-6, upper right panel; IP-10, lower left panel; and IL-IRA, lower right panel) over time in NHP treated with LNP1 and LNP2 as described in the Examples.

[0320] FIGS. 19A and 19B are plots of plasma pharmacokinetic profiles of iLipid (FIG. 19A) and PEG lipids (FIG. 19B) in NHP treated with LNP1 and LNP2 as described in the Examples.

[0321] FIG. 20 is a bar graph showing hepatic editing of TTR gene by LNP3 in NHPs as described in the Examples.

[0322] FIG. 21 is a plot showing serum TTR protein changes measured by ELISA in NHP treated with LNP3 as described in the Examples.

[0323] FIG. 22 is a plot showing serum TTR protein changes measured by liquid chromatography-mass spectrometry in NHP treated with LNP3 as described in the Examples.

[0324] FIGS. 23A and 23B are a bar graphs showing serum Alanine Aminotransferase (ALT), FIG. 23A, and serum Aspartate Aminotransferase (AST), FIG. 23B, concentrations in NHP treated with LNP3 as described in the Examples.

[0325] FIGS. 24A and 24B are a bar graphs showing serum Lactate Dehydrogenase (LDH), FIG. 24A, and serum Glutamate Dehydrogenase (GDH), FIG. 24B, concentrations in NHP treated with LNP3 as described in the Examples.

[0326] FIGS. 25A and 25B are a bar graphs showing serum Gamma-Glutamyl Transferase (GGT), FIG. 25A, and serum Alkaline Phosphatase (AP), FIG. 25B, concentrations in NHP treated with LNP3 as described in the Examples.

[0327] FIG. 26 is a bar graph showing serum total bilirubin concentrations in NHP treated with LNP2 as described in the Examples.

[0328] FIG. 27 is a bar graph showing serum creatine kinase concentrations in NHP treated with LNP3 as described in the examples.

[0329] FIGS. 28A and 28B are plots of plasma pharmacokinetic profiles of iLipid (FIG. 28A) and PEG lipids (FIG. 28B) in NHP treated with LNP1 and LNP2 as described in the Examples.

[0330] FIGS. 29A-29C are plots showing base editing efficiency for base editor systems comprising the indicated base editors in combination with the indicated guide RNAs targeting a transthyretin (TTR) polynucleotide. FIG. 29A is a plot of A→G base editing efficiencies at a conserved splice site motif using the indicated base editors and guides. FIG. 29B is a plot of C>T base editing efficiencies in a splice site motif using the indicated base editors and guides. FIG. 29C is a plot of indel editing efficiencies.

[0331] FIG. 30 is a plot showing editing efficiency for a bhCas12b endonuclease used in combination with the indicated guide RNAs targeting a transthyretin (TTR) polynucleotide.

[0332] FIG. 31 provides a bar graph showing human TTR protein concentrations measured by ELISA in PXB-cell hepatocytes prior to transfection. Each condition was run in triplicate, as represented by each dot in the assay. Bar graphs illustrate the mean TTR protein concentrations and error bars indicate the standard deviation.

[0333] FIG. 32 provides a combined bar graph and plot showing editing rates in PXB-cell hepatocytes at the targeted site assessed at 13 days post-transfection by NGS(squares, right axis), and human TTR protein concentrations assessed 7 days post-transfection by ELISA (bars, left axis). Each condition was run in triplicate, as represented by each dot. In FIG. 32, the dotted line indicates the average human TTR concentration in cells edited using the base editing system ABE8.8_sgRNA_088. The starred sample (Cas9_gRNA991*) indicates that maximum indel rate within the protospacer region was measured, rather than rate of target base-editing.

[0334] FIG. 33 provides a combined bar graph and plot showing Editing rates in PXB-cell hepatocytes at the targeted site assessed at 13 days post-transfection by NGS(squares, right axis), and human TTR protein concentrations assessed 13 days post-transfection by ELISA (bars, left axis). Each condition was run in triplicate, as represented by each dot. In FIG. 33. The dotted line indicates the average human TTR concentration in cells edited using the base editing system ABE8.8_sgRNA_088. Starred sample indicates that maximum indel rate within the protospacer region was measured, rather than rate of target base-editing.

[0335] FIG. 34 provides a bar graph showing cyno TTR protein concentrations measured by ELISA in primary cyno hepatocyte co-culture supernatants prior to transfection. Each condition was run in triplicate, as represented by each dot in the assay. The bars illustrate the mean TTR protein concentrations and error bars indicate the standard deviation.

[0336] FIG. 35 provides a combined bar graph and plot showing editing rates in primary cyno hepatocyte co-cultures at the targeted site assessed at 13 days post-transfection by NGS (squares, right axis), and cyno TTR protein concentrations assessed 7 days post-transfection by ELISA (bars, left axis). Each condition was run in triplicate, as represented by each dot in the graph. The dotted line indicates the average cyno TTR concentration in cells edited using a base editing system including ABE8.8_sgRNA_088.

[0337] FIG. 36 provides a combined bar graph and plot showing editing rates in primary cyno hepatocyte co-cultures at the targeted site assessed at 13 days post-transfection by NGS (squares, right axis), and cyno TTR protein concentrations assessed 13 days post-transfection by ELISA (bars, left axis). Each condition was run in triplicate, as represented by each dot in the graph. The dotted line indicates the average cyno TTR concentration in cells edited using the base editing system ABE8.8_sgRNA_088.

[0338] FIGS. 37A and 37B present schematics showing the TTR promoter sequence aligned to gRNAs designed for a screen. In FIG. 37A, The gRNAs are shown above or below the sequence shown in the figure depending on their strand orientation. In each of FIGS. 37A and 37B, the gRNA protospacer sequence plus PAM sequence is shown in each annotation. The nucleotide sequence shown in FIGS. 37A and 37B is provided in the sequence listing as SEQ ID NO: 1229 and the amino acid sequence shown in FIGS. 37A and 37B is provided in the sequence listing as SEQ ID NO: 1230.

[0339] FIG. 38 provides a bar graph showing next-generation sequencing (NGS) data from three replicates of HepG2 cells transfected with mRNA encoding the indicated editor (indicated above the bars) and gRNA encoding the indicated gRNA (indicated along the x-axis). Dots represent individual data points for each edit type (i.e., indel, max. A-to-G, max. C-to-T) shown. Max A-to-G or max. C-to-T reflects the highest editing frequency for any A or C base within the gRNA protospacer. Three replicates were performed on the same day.

[0340] FIG. 39 provides a bar graph showing TTR knockdown data. Individual data points for 2 replicates of TTR expression data are plotted. Three technical replicates for each data point for the RT-qPCR were performed and the mean is plotted for 2 biological data points. All data are from transfections were performed on the same day. RT-qPCR analysis was performed relative to untreated controls in the same RT-qPCR plate as the test well. ACTB was used as an internal control for each sample. Untreated cells had a different TTR: ACTB ratio than transfected cells, which led to artificially reduced relative TTR expression (0.30-0.42) in cells transfected with negative control catalytically dead Cas9 editor or gRNA that would not affect TTR expression.

[0341] FIGS. 40A and 40B provide schematics showing the location of promoter tiling gRNAs effective in a TTR RT-qPCR knockdown assay. All gRNAs that demonstrated comparable or improved TTR knockdown as compared with a nuclease approach are shown. Five highly effective gRNAs, as measured by TTR RT-qPCR, were gRNA1756 ABE, gRNA1764 ABE, gRNA1790 CBE, gRNA1786 ABE, and gRNA1772 ABE. A few gRNAs that lowered TTR transcript levels overlapped with putative functional elements including a putative TATA box (transcription initiation site) and a start codon (translation initiation site) as indicated in FIGS. 40A and 40B. In FIGS. 40A and 40B,*indicates the gRNA was highly effective when paired with either an ABE or CBE;**indicates editing frequency was <50% for this gRNA, not intending to be bound by theory, this could indicate that the gRNA was acting though a mechanism distinct from or in addition to base editing; and***indicates both that the gRNA was highly effective when paired with either an ABE or CBE and that editing frequency was <50% for this gRNA. In FIG. 40B, five potent gRNA's, as measure dby TTR RT-qPCR, are shown in white (gRNA1756 ABE, gRNA1764 ABE, gRNA1790 CBE, gRNA1786 ABE, and gRNA1772 ABE). The nucleotide sequence shown in FIG. 40A is provided in the sequence listing as SEQ ID NO: 1226 and the amino acid sequence shown in FIG. 40A is provided in the sequence listing as SEQ ID NO: 1227. The nucleotide sequence shown in FIG. 40B corresponds to SEQ ID NO: 1228.

[0342] FIG. 41 provides a bar graph showing editing rates at the targeted sites assessed at 72 hours post-transfection by NGS. Each experimental condition was run in triplicate and is displayed as an average with standard error of the mean. Total splice site disruption without unintended in-gene edits is shown as the left bar of each pair of bars, and unintended edits are shown as the right bar of each pair of bars. The total editing by the gRNA991 spCas9 control is displayed as the left bar for the “gRNA991+spCas9” sample.

[0343] FIG. 42 is a graph that shows percent base editing in primary human hepatocytes at various doses total RNA (ng/TA/ml) where GA521 was provided as the guide RNA. GA521 showed sustained base editing of greater than 40% in primary human hepatocytes.

### DETAILED DESCRIPTION

[0344] Provided herein are compositions for gene modification or editing and methods of using the same to treat or prevent conditions associated with the extracellular deposition in various tissues of amyloid fibrils formed by the aggregation of misfolded transthyretin (TTR) proteins. Such conditions include, but are not limited to, polyneuropathy due to hereditary transthyretin amyloidosis (hATTR-PN) and hereditary cardiomyopathy due to transthyretin amyloidosis (hATTR-CM), both associated with autosomal dominant mutations of the TTR gene, and an age-related cardiomyopathy associated with wild-type TTR proteins (ATTRwt), also known as senile cardiac amyloidosis. Compositions and methods directed to editing the TTR gene using an editing system such as one comprising a base editor and guide RNAs are disclosed. The invention is based, at least in part, on the discovery that editing can be used to disrupt expression of a transthyretin polypeptide or to edit a pathogenic mutation in a transthyretin polypeptide. In one particular embodiment, the invention provides guide RNA sequences that are effective for use in conjunction with a base editing system for editing a transthyretin (TTR) gene sequence to disrupt splicing or correct a pathogenic mutation. In another embodiment, the invention provides guide RNA sequences that target a Cas12b nuclease to edit a TTR gene sequence, thereby disrupting TTR polypeptide expression.

[0345] Accordingly, the invention provides guide RNA sequences suitable for use with ABE and/or BE4 for transthyretin (TTR) gene splice site disruption and guide RNA sequences suitable for use with bhCas12b nucleases for disruption of the transthyretin (TTR) gene. In embodiments, the compositions and methods of the present invention can be used for editing a TTR gene in a hepatocyte. The methods provided herein can include reducing or eliminating expression of TTR in a hepatocyte cell to treat an amyloidosis.

### Transthyretin Protein and Gene

[0346] Transthyretin (TTR), originally known as prealbumin, is a 55-kDa transport protein for both thyroxine (T4) and retinol-binding protein, that circulates in soluble form in the serum and cerebrospinal fluid (CSF) of healthy humans. TTR is understood to be primarily synthesized in the liver. Under normal conditions, TTR circulates as a homotetramer with a central channel. The wild-type TTR monomer is 147 amino acids in length and has the amino acid sequence below:

(SEQ ID NO: 464)
MASHRLLLLC LAGLVFVSEA GPTGTGESKC PLMVKVLDAV
RGSPAINVAV HVFRKAADDT WEPFASGKTS ESGELHGLTT
EEEFVEGIYK VEIDTKSYWK ALGISPFHEH AEVVFTANDS
GPRRYTIAAL LSPYSYSTTA VVTNPKE.

[0347] The TTR gene, composed of four exons, is located on chromosome 18 at 18q12.1. The full sequence of the human TTR gene is shown in FIG. 4 and is also available at UniProtKB-P02766 (TTHY_HUMAN). Over 120 TTR variants have so far been identified, the great majority of which are pathogenic. The most common pathogenic variant consists of a point mutation leading to replacement of valine by methionine at position 30 of the mature protein. This Val30Met mutation is responsible for hATTR amyloidosis and is the most frequent amyloidogenic mutation worldwide, accounting for about 50% of TTR variants.

[0348] Hereditary transthyretin amyloidosis (hATTR) is a disease caused by mutations in the TTR gene. Autosomal dominant mutations destabilize the TTR tetramer and enhance dissociation into monomers, resulting in misfolding, aggregation, and the subsequent extracellular deposition of TTR amyloid fibrils in different tissue sites. This multisystem extracellular deposition of amyloid (amyloidosis) results in dysfunction of different organs and tissues. In particular, polyneuropathy due to transthyretin amyloidosis (ATTR-PN) and cardiomyopathy due to transthyretin amyloidosis (ATTR-CM) are severe disorders associated with significant morbidity and mortality.

[0349] When there is clinical suspicion for hATTR-PN, diagnosis is typically done by tissue biopsy with staining for amyloid, amyloid typing (using immunohistochemistry or mass spectrometry), and/or TTR gene sequencing. When there is clinical suspicion for ATTR-CM, the key diagnostic tools are either endomyocardial biopsy (with tissue staining and amyloid typing by immunohistochemistry or mass spectrometry) or 99mtechnetium-pyrophosphate scan. Both of these approaches can provide a diagnosis of ATTR-CM. TTR gene sequencing can be used to differentiate between the hATTR-CM (mutation positive) and ATTRwt-CM (mutation negative).

[0350] The compositions described herein include a spacer having a nucleotide sequence that functions as a guide to direct a gene editing protein (e.g., a base editor) to alter the TTR gene, for example by introducing one or more nucleobase alterations in the TTR gene. These point mutations may be used to disrupt gene function, by the introduction of a missense mutation(s) that results in production of a less functional, or non-functional protein, thus silencing the TTR gene. Alternatively, it is contemplated herein that corrections to one or more point mutation(s) may be made using a gene editing protein to alter a mutated gene to correct the underlying mutation causing the dysfunction in the TTR gene or otherwise mitigate against dysfunction of the gene.

### Amyloidosis

[0351] Amyloidosis is a disorder that involved extracellular deposition of amyloid in an organ or tissue (e.g., the liver). Amyloidosis can occur when mutant transthyretin polypeptides aggregate (e.g., as fibrils). An amyloidosis caused by a mutation to the transthyretin gene can be referred to as a “transthyretin amyloidosis”. Some forms of transthyretin amyloidosis are not associated with a mutation to the transthyretin gene. Non-limiting examples of mutations to the mature transthyretin (TTR) protein that can lead to amyloidosis include the alterations T60A, V30M, V30A, V30G, V30L, V122I, V122A, and V122 (-). One method for treatment of transthyretin amyloidosis includes disrupting expression or activity of transthyretin in a cell of a subject, optionally a hepatocyte cell. Accordingly, provided herein are methods for reducing or eliminating expression of transthyretin in a cell. The transthyretin in the cell can be a pathogenic variant. Expression of transthyretin in a cell can be disrupted by disrupting splicing of a transthyretin transcript.

[0352] Transthyretin amyloidosis is a progressive condition characterized by the buildup of protein deposits in organs and/or tissues. These protein deposits can occur in the peripheral nervous system, which is made up of nerves connecting the brain and spinal cord to muscles and sensory cells that detect sensations such as touch, pain, heat, and sound. Protein deposits in these nerves result in a loss of sensation in the extremities (peripheral neuropathy). The autonomic nervous system, which controls involuntary body functions such as blood pressure, heart rate, and digestion, may also be affected by amyloidosis. In some cases, the brain and spinal cord (i.e., central nervous system) are affected. Other areas of amyloidosis include the heart, kidneys, eyes, liver, and gastrointestinal tract. The age at which symptoms begin to develop can be between the ages of 20 and 70.

[0353] There are three major forms of transthyretin amyloidosis, which are distinguished by their symptoms and the body systems they effect: neuropathic, leptomeningeal, and cardiac.

[0354] The neuropathic form of transthyretin amyloidosis primarily affects the peripheral and autonomic nervous systems, resulting in peripheral neuropathy and difficulty controlling bodily functions. Impairments in bodily functions can include sexual impotence, diarrhea, constipation, problems with urination, and a sharp drop in blood pressure upon standing (orthostatic hypotension). Some people experience heart and kidney problems as well. Various eye problems may occur, such as cloudiness of the clear gel that fills the eyeball (vitreous opacity), dry eyes, increased pressure in the eyes (glaucoma), or pupils with an irregular or “scallope” d appearance. Some people with this form of transthyretin amyloidosis develop carpal tunnel syndrome, which can involve numbness, tingling, and weakness in the hands and fingers.

[0355] The leptomeningeal form of transthyretin amyloidosis primarily affects the central nervous system. In people with this form, amyloidosis occurs in the leptomeninges, which are two thin layers of tissue that cover the brain and spinal cord. A buildup of protein in this tissue can cause stroke and bleeding in the brain, an accumulation of fluid in the brain (hydrocephalus), difficulty coordinating movements (ataxia), muscle stiffness and weakness (spastic paralysis), seizures, and loss of intellectual function (dementia). Eye problems similar to those in the neuropathic form may also occur. When people with leptomeningeal transthyretin amyloidosis have associated eye problems, they are said to have the oculoleptomeningeal form.

[0356] The cardiac form of transthyretin amyloidosis affects the heart. People with cardiac amyloidosis may have an abnormal heartbeat (arrhythmia), an enlarged heart (cardiomegaly), or orthostatic hypertension. These abnormalities can lead to progressive heart failure and death. Occasionally, people with the cardiac form of transthyretin amyloidosis have mild peripheral neuropathy.

[0357] Mutations in the transthyretin (TTR) gene cause transthyretin amyloidosis. Transthyretin transports vitamin A (retinol) and a hormone called thyroxine throughout the body. Not being bound by theory, to transport retinol and thyroxine, transthyretin must form a tetramer. Transthyretin is produced primarily in the liver (i.e., in hepatic cells). A small amount of transthyretin (TTR) is produced in an area of the brain called the choroid plexus and in the retina.

[0358] TTR gene mutations can alter the structure of transthyretin, impairing its ability to bind to other transthyretin proteins. The TTR gene mutation can be autosomal dominant.

### Splice Sites

[0359] Gene splice sites and splice site motifs are well known in the art and it is within the skill of a practitioner to identify splice sites in sequence (see, e.g., Sheth, et al., “Comprehensive splice-site analysis using comparative genomics”, Nucleic Acids Research, 34:3955-3967 (2006); Dogan, et al., “AplicePort—an interactive splice-site analysis tool”, Nucleic Acids Research, 35: W285-W291 (2007); and Zuallaert, et al., “SpliceRover: interpretable convolutional neural networks for improved splice site prediction”, Bioinformatics, 34:4180-4188 (2018)).

[0360] As shown in FIG. 2, canonical splice donors comprise the DNA sequence GT on the sense strand, whereas canonical splice acceptors comprise the DNA sequence AG. Alteration of the sequence disrupts normal splicing. Splice donors can be disrupted by adenine base editing of the complementary base in the second position in the antisense strand (GT→GC), and splice acceptors can be disrupted by adenine base editing of the first position in the sense strand (AG→GG).

### Editing of Target Genes

[0361] To edit the transthyretin (TTR) gene, a cell (e.g., a hepatocyte) is contacted with a guide RNA and a nucleobase editor polypeptide comprising a nucleic acid programmable DNA binding protein (napDNAbp) and a cytidine deaminase or adenosine deaminase to edit a base of a gene sequence. Editing of the base can result in disruption of a splice site (e.g, through alteration of a splice-site motif nucleobase). Editing of the base can result in replacement of a pathogenic variant amino acid with a non-pathogenic variant amino acid. As a non-limiting example, editing of the base can result in replacing a T60A, V30M, V30A, V30G, V30L, V122I, V122A, or a V122 (-) alteration in the mature transthyretin (TTR) polypeptide with a non-pathogenic variant or the wild-type valine residue. The cytidine deaminase can be BE4 (e.g., saBE4). The adenosine deaminase can be ABE (e.g., saABE.8.8). In some embodiments, multiple target sites are edited simultaneously. In some embodiments, the TTR gene is edited by contacting a cell with a nuclease and a guide RNA to introduce an indel into a gene sequence. The indel can be associated with a reduction or elimination of expression of the gene. The nuclease can be Cas12b (e.g., bhCas12b). The cells can be edited in vivo or ex vivo. The guide RNA can be a single guide or a dual guide. In some embodiments, cells to be edited are contacted with at least one nucleic acid, wherein at least one nucleic acid encodes a guide RNA, or two or more guide RNAs, and a nucleobase editor polypeptide comprising a nucleic acid programmable DNA binding protein (napDNAbp) and a deaminase, e.g., an adenosine or a cytidine deaminase. In some embodiments, the gRNA comprises nucleotide analogs. These nucleotide analogs can inhibit degradation of the gRNA by cellular processes. Exemplary single guide RNA (sgRNA) sequences are provided in Tables 1, 8, 20, 27, and 28 and exemplary spacer sequences and target sequences (e.g., protospacer sequences) are provided in Tables 2A, 2B, 2C, 9, 10, 20, 25, 29, and 30.

[0362] With the present disclosure, protospacer sequences were identified within the nucleotide sequence of the human TTR gene to be used as guide sequences that permit ABE8.8 (and other ABE variants containing Streptococcus pyogenes Cas9, such as ABE7.10, or another Cas protein that can use the NGG PAM) to either disrupt the start codon, or disrupt splice sites, whether donors or acceptors, via A→G editing within its editing window (roughly positions 4 to 7 in the 20-nt protospacer region of DNA). Four of the sequences shown in Table 8 were identified within the human TTR gene. The alignment of these four protospacer sequences on a map of the human TTR gene is shown in FIG. 3.

[0363] Protospacer, corresponding to guide RNA GA457, has the sequence 5′-GCCATCCTGCCAAGAATGAG-3′ (SEQ ID NO: 467) and is located at 34,879 to 34,898 bp of the human TTR gene.

[0364] Protospacer, corresponding to guide RNA GA459, has the sequence 5′-GCAACTTACCCAGAGGCAAA-3′ (SEQ ID NO: 468) and is located at 36,007 to 36,026 bp of the human TTR gene.

[0365] Protospacer, corresponding to guide RNA GA460, has the sequence 5′-TATAGGAAAACCAGTGAGTC-3′ (SEQ ID NO: 469) and is located at 38,106-38,125 bp of the human TTR gene.

[0366] Protospacer, corresponding to guide RNA GA461, has the sequence 5′-TACTCACCTCTGCATGCTCA-3′ (SEQ ID NO: 470) and is located at 38,234-38253 of the human TTR gene.

[0367] Protospacer, corresponding to guide RNA GA458, has the sequence 5′-GCCATCCTGCCAAGAACGAG-3′ (SEQ ID NO: 471) represents the sequence within the cynomolgus macaque TTR gene corresponding to the human protospacer sequence corresponding to guide RNA GA459.

[0368] The present disclosure includes a guide polynucleotide having a sequence at least about 75%, at least about 80%, at least about 85%, at least about 90%, or at least about 95% identical to the sequence 5′-GCCAUCCUGCCAAGAAUGAG-3′ (SEQ ID NO: 472) (GA457). The present disclosure includes a guide polynucleotide having the sequence 5′-GCCAUCCUGCCAAGAAUGAG-3′ (SEQ ID NO: 472) (GA457).

[0369] The present disclosure includes a modified guide polynucleotide having a sequence at least about 75%, at least about 80%, at least about 85%, at least about 90%, or at least about 95% identical to the sequence 5′-GCCAUCCUGCCAAGAAUGAG-3′ (SEQ ID NO: 472), wherein GCC are modified by methylation (GA521) (C is modified to 2′-O-methylcytidine, G is modified to 2′-O-methylguanosine). The present disclosure includes a modified guide polynucleotide having the sequence 5′-mGsmCsmCAUCCUGCCAAGAAUGAG-3′ (SEQ ID NO: 472) (GA521), wherein mC: 2′-O-methylcytidine, mG: 2′-O-methylguanosine and s: phosphorothioate (PS) backbone linkage.

[0370] The present disclosure includes a guide polynucleotide having a sequence at least about 75%, at least about 80%, at least about 85%, at least about 90%, or at least about 95% identical to the sequence 5′-GCCAUCCUGCCAAGAACGAG-3′ (SEQ ID NO: 473) (GA458). The present disclosure includes a guide polynucleotide having the sequence 5′-GCCAUCCUGCCAAGAACGAG-3′ (SEQ ID NO: 473) (GA458).

[0371] The present disclosure includes a guide polynucleotide having a sequence at least about 75%, at least about 80%, at least about 85%, at least about 90%, or at least about 95% identical to the sequence 5′-GCAACUUACCCAGAGGCAAA-3′ (SEQ ID NO: 474) (GA459). The present disclosure includes a guide polynucleotide having the sequence 5′-GCAACUUACCCAGAGGCAAA-3′ (SEQ ID NO: 474) (GA459).

[0372] The present disclosure includes a guide polynucleotide having a sequence at least about 75%, at least about 80%, at least about 85%, at least about 90%, or at least about 95% identical to the sequence 5′-UAUAGGAAAACCAGUGAGUC-3′ (SEQ ID NO: 475) (GA460). The present disclosure includes a guide polynucleotide having the sequence 5′-UAUAGGAAAACCAGUGAGUC-3′ (SEQ ID NO: 475) (GA460).

[0373] The present disclosure includes a guide polynucleotide having a sequence at least about 75%, at least about 80%, at least about 85%, at least about 90%, or at least about 95% identical to the sequence 5′-UACUCACCUCUGCAUGCUCA-3′ (SEQ ID NO: 476) (GA461). The present disclosure includes a guide polynucleotide having the sequence 5′-UACUCACCUCUGCAUGCUCA-3′ (SEQ ID NO: 476) (GA461).

[0374] In some aspects, provided herein is a guide RNA, comprising a sequence defined by mG*mC*mC*AUCCUGCCAAGAAUGAGmGUUUUAGmAmGmCmUmAGmAmAmAmUmAmGmCmAm AGUUmAAmAAmUAmAmGmGmCmUmAGUmCmCGUUAmUmCAAmCmUmUGmAmAmAmAmAmGmU mGGmCmAmCmCmGmAmGmUmCmGmGmUmGmCmU*mU*mU*mU (GA521, (SEQ ID NO: 477), wherein A is adenosine, C is cytidine, G is guanosine, U is uridine, mA*is 2′-O-methyladenosine, mC*is 2′-O-methylcytidine, mG*is 2′-O-methylguanosine, mU*is 2′-O-methyluridine, and wherein nucleotides represented in bold are linked by a phosphorothioate (PS) backbone linkage.

[0375] Alternatively, GA521 is represented as

[0376] mG*smC*smC*AUCCUGCCAAGAAUGAGmGsUsUsUsUsAsGsmAsmGsmCsmUsmA SGsmAsmAsmAsmUsmAsmGsmCssmAsmAsGsUsUsmAsAsmAsAsmUsAsmAsmGsmGsm CsmUsmAsGsUsmCsmCsGsUsUsAsmUsmCsAsAsmCsmUsmUsGsmAsmAsmAsmAsmAs mGsmUsmGsGsmCsmAsmCsmCsmGsmAsmGsmUsmCsmGsmGsmUsmGsmCsmU*smU*sm U*smU (GA521, SEQ ID NO: 477), wherein A is adenosine, C is cytidine, G is guanosine, U is uridine, mA*is 2′-O-methyladenosine, mC*is 2′-O-methylcytidine, mG*is 2′-O-methylguanosine, mU*is 2′-O-methyluridine, and wherein nucleotides are linked by a phosphorothioate (PS) backbone linkage represented by the letter ‘s’.

[0377] In some embodiments,

[0378] mG*mC*mC*AUCCUGCCAAGAAUGAGmGUUUUAGmAmGmCmUmAGmAmAmAmUmAmG mCmAmAGUUmAAmAAmUAmAmGmGmCmUmAGUmCmCGUUAmUmCAAmCmUmUGmAmAmAmAm AmGmUmGGmCmAmCmCmGmAmGmUmCmGmGmUmGmCmU*mU*mU*mU (GA521, SEQ ID NO: 477), wherein A is adenosine, C is cytidine, G is guanosine, U is uridine, mA*is 2′-O-methyladenosine, mC*is 2′-O-methylcytidine, mG*is 2′-O-methylguanosine, mU*is 2′-O-methyluridine, and wherein nucleotides represented in bold are linked by a phosphorothioate (PS) backbone linkage.

[0379] Alternatively, GA521 is represented as

[0380] mG*mC*mC*AUCCUGCCAAGAAUGAGmGsUsUsUsUsAsGsmAsmsGsmCsmUsmAs GsmAsmAsmAsmUsmAsmGsmCssmAsmAsGsUsUsmAsAsmAsAsmUsAsmAsmGsmGsmC smUsmAsGsUsmCsmCsGsUsUsAsmUsmCsAsAsmCsmUsmUsGsmAsmAsmAsmAsmAsm GsmUsmGsGsmCsmAsmCsmCsmGsmAsmGsmUsmCsmGsmGsmUsmGsmCsmU*mU*mU*m U (GA521, SEQ ID NO: 478), wherein A is adenosine, C is cytidine, G is guanosine, U is uridine, mA*is 2′-O-methyladenosine, mC*is 2′-O-methylcytidine, mG*is 2′-O-methylguanosine, mU*is 2′-O-methyluridine, and wherein nucleotides represented in bold are linked by a phosphorothioate (PS) backbone linkage represented by the letter ‘s’.

[0381] In various instances, it is advantageous for a spacer sequence to include a 5′ and/or a 3′ “G” nucleotide. In some cases, for example, any spacer sequence or guide polynucleotide provided herein comprises or further comprises a 5′ “G”, where, in some embodiments, the 5′ “G” is or is not complementary to a target sequence. In some embodiments, the 5′ “G” is added to a spacer sequence that does not already contain a 5′ “G.” For example, it can be advantageous for a guide RNA to include a 5′ terminal “G” when the guide RNA is expressed under the control of a U6 promoter or the like because the U6 promoter prefers a “G” at the transcription start site (see Cong, L. et al. “Multiplex genome engineering using CRISPR/Cas systems. Science 339:819-823 (2013) doi: 10.1126/science.1231143). In some cases, a 5′ terminal “G” is added to a guide polynucleotide that is to be expressed under the control of a promoter, but is optionally not added to the guide polynucleotide if or when the guide polynucleotide is not expressed under the control of a promoter.

[0382] Exemplary guide RNAs, spacer sequences, and target sequences are provided in Tables 1, 2A, 2B, 2C, 9, 10, 20, 25, and 27-30.

[0383] In various instances, it is advantageous for a spacer sequence to include a 5′ and/or a 3′ “G” nucleotide. In some cases, for example, any spacer sequence or guide polynucleotide provided herein comprises or further comprises a 5′ “G”, where, in some embodiments, the 5′ “G” is or is not complementary to a target sequence. In some embodiments, the 5′ “G” is added to a spacer sequence that does not already contain a 5′ “G.” For example, it can be advantageous for a guide RNA to include a 5′ terminal “G” when the guide RNA is expressed under the control of a U6 promoter or the like because the U6 promoter prefers a “G” at the transcription start site (see Cong, L. et al. “Multiplex genome engineering using CRISPR/Cas systems. Science 339:819-823 (2013) doi: 10.1126/science. 1231143). In some cases, a 5′ terminal “G” is added to a guide polynucleotide that is to be expressed under the control of a promoter, but is optionally not added to the guide polynucleotide if or when the guide polynucleotide is not expressed under the control of a promoter.

[0384] In embodiments, a guide RNA comprises a sequence complementary to a promoter region of a TTR polynucleotide sequence. In embodiments, the promoter region spans from positions +10, +5, +1, −1, −2, −3, −4, −5, −6, −7, −8, −9, −10, −15, −20, −25, −30, −35, −40, −45, −50, −55, −60, −65, −70, −75, −80, −85, −90, −95, −100, −105, −110, −115, −120, −125, −130, −135, −140, −145, −150, −155, −160, −165, −170, −175, −180, −185, −190, −195, −200, −250, or −300 to position +5, +1, −1, −2, −3, −4, −5, −6, −7, −8, −9, −10, −15, −20, −25, −30, −35, −40, −45, −50, −55, −60, −65, −70, −75, −80, −85, −90, −95, −100, −105, −110, −115, −120, −125, −130, −135, −140, −145, −150, −155, −160, −165, −170, −175, −180, −185, −190, −195, −200, −250, −300, or −400, where position +1 corresponds to the first A of the start codon (ATG) of the TTR polynucleotide sequence.

[0385] Variants of the spacer sequences listed in the following tables comprising 1, 2, 3, 4, or 5 nucleobase alterations are contemplated. For example, variation of a target polynucleotide sequence within a population (e.g., single nucleotide polymorphisms) may require said alterations to a spacer sequence to allow the spacer to better bind a variant of a target sequence in a subject.

TABLE 1
Exemplary guide RNAs for editing transthyretin
(TTR) splice sites and/or introducing indels into
the TTR gene (e.g., using bhCas12b)

| | | SEQ ID |
|---|---|---|
| sgRNA ID | Sequence | NO |
| sgRNA_361 | mUsmAsmUsAGGAAAACCAGTGAGTCGUUUUAGAGCUAGAAAUA | 479 |
| | GCAAGUUAAAAUAAGGCUAGUCCGUUAUCAACUUGAAAAAGUGG | |
| | CACCGAGUCGGUGCmUsmUsmUsU | |
| sgRNA_362 | mUsmAsmCsUCACCUCUGCAUGCUCAGUUUUAGAGCUAGAAAUA | 480 |
| | GCAAGUUAAAAUAAGGCUAGUCCGUUAUCAACUUGAAAAAGUGG | |
| | CACCGAGUCGGUGCmUsmUsmUsU | |
| sgRNA_363 | mAsmCsmUsCACCUCUGCAUGCUCAUGUUUUAGAGCUAGAAAUA | 481 |
| | GCAAGUUAAAAUAAGGCUAGUCCGUUAUCAACUUGAAAAAGUGG | |
| | CACCGAGUCGGUGCmUsmUsmUsU | |
| sgRNA_364 | mUsmAsmCsCACCUAUGAGAGAAGACGUUUUAGAGCUAGAAAUA | 482 |
| | GCAAGUUAAAAUAAGGCUAGUCCGUUAUCAACUUGAAAAAGUGG | |
| | CACCGAGUCGGUGCmUsmUsmUsU | |
| sgRNA_365 | mAsmUsmAsCUCACCUCUGCAUGCUCAGUUUUAGUACUCUGUAA | 483 |
| | UGAAAAUUACAGAAUCUACUAAAACAAGGCAAAAUGCCGUGUUU | |
| | AUCUCGUCAACUUGUUGGCGAGAmUsmUsmUsU | |
| sgRNA_366 | mAsmCsmUsGGUUUUCCUAUAAGGUGUGUUUUAGUACUCUGUAA | 484 |
| | UGAAAAUUACAGAAUCUACUAAAACAAGGCAAAAUGCCGUGUUU | |
| | AUCUCGUCAACUUGUUGGCGAGAmUsmUsmUsU | |
| sgRNA_367 | mGsmUsmUsCUGUCUUUUGGUCAGGACAACCGUCUAGCUAUAAG | 485 |
| | UGCUGCAGGGUGUGAGAAACUCCUAUUGCUGGACGAUGUCUCUU | |
| | ACGAGGCAUUAGCACUUGGCAGGAUGGCUUCUCmAsmUsmCsG | |
| sgRNA_368 | mGsmUsmUsCUGUCUUUUGGUCAGGACAACCGUCUAGCUAUAAG | 486 |
| | UGCUGCAGGGUGUGAGAAACUCCUAUUGCUGGACGAUGUCUCUU | |
| | ACGAGGCAUUAGCACUCCUAUAAGGUGUGAAAGmUsmCsmUsG | |
| sgRNA_369 | mGsmUsmUsCUGUCUUUUGGUCAGGACAACCGUCUAGCUAUAAG | 487 |
| | UGCUGCAGGGUGUGAGAAACUCCUAUUGCUGGACGAUGUCUCUU | |
| | ACGAGGCAUUAGCACUGAGCCCAUGCAGCUCUCmCsmAsmGsA | |
| sgRNA_370 | mGsmUsmUsCUGUCUUUUGGUCAGGACAACCGUCUAGCUAUAAG | 488 |
| | UGCUGCAGGGUGUGAGAAACUCCUAUUGCUGGACGAUGUCUCUU | |
| | ACGAGGCAUUAGCACCUCCUCAGUUGUGAGCCCmAsmUsmGsC | |
| sgRNA_371 | mGsmUsmUsCUGUCUUUUGGUCAGGACAACCGUCUAGCUAUAAG | 489 |
| | UGCUGCAGGGUGUGAGAAACUCCUAUUGCUGGACGAUGUCUCUU | |
| | ACGAGGCAUUAGCACGUAGAAGGGAUAUACAAAmGsmUsmGsG | |
| sgRNA_372 | mGsmUsmUsCUGUCUUUUGGUCAGGACAACCGUCUAGCUAUAAG | 490 |
| | UGCUGCAGGGUGUGAGAAACUCCUAUUGCUGGACGAUGUCUCUU | |
| | ACGAGGCAUUAGCACCCACUUUGUAUAUCCCUUmCsmUsmAsC | |
| sgRNA_373 | mGsmUsmUsCUGUCUUUUGGUCAGGACAACCGUCUAGCUAUAAG | 491 |
| | UGCUGCAGGGUGUGAGAAACUCCUAUUGCUGGACGAUGUCUCUU | |
| | ACGAGGCAUUAGCACGGUGUCUAUUUCCACUUUmGsmUsmAsU | |
| sgRNA_374 | mGsmUsmUsCUGUCUUUUGGUCAGGACAACCGUCUAGCUAUAAG | 492 |
| | UGCUGCAGGGUGUGAGAAACUCCUAUUGCUGGACGAUGUCUCUU | |
| | ACGAGGCAUUAGCACCAUGAGCAUGCAGAGGUGmAsmGsmUsA | |
| gRNA1594 | mCsmAsmAsCUUACCCAGAGGCAAAUGUUUUAGAGCUAGAAAUA | 493 |
| | GCAAGUUAAAAUAAGGCUAGUCCGUUAUCAACUUGAAAAAGUGG | |
| | CACCGAGUCGGUGCUsmUsmUsmU | |
| gRNA1595 | mAsmAsmUsGGCUCCCAGGUGUCAUCGUUUUAGAGCUAGAAAUA | 494 |
| | GCAAGUUAAAAUAAGGCUAGUCCGUUAUCAACUUGAAAAAGUGG | |
| | CACCGAGUCGGUGCUsmUsmUsmU | |
| gRNA1596 | mGsmGsmCsUCCCAGGUGUCAUCAGCGUUUUAGAGCUAGAAAUA | 495 |
| | GCAAGUUAAAAUAAGGCUAGUCCGUUAUCAACUUGAAAAAGUGG | |
| | CACCGAGUCGGUGCUsmUsmUsmU | |
| gRNA1597 | mCsmUsmCsUCAUAGGUGGUAUUCACGUUUUAGAGCUAGAAAUA | 496 |
| | GCAAGUUAAAAUAAGGCUAGUCCGUUAUCAACUUGAAAAAGUGG | |
| | CACCGAGUCGGUGCUsmUsmUsmU | |
| gRNA1598 | mUsmAsmUsAGGAAAACCAGUGAGUCGUUUUAGAGCUAGAAAUA | 497 |
| | GCAAGUUAAAAUAAGGCUAGUCCGUUAUCAACUUGAAAAAGUGG | |
| | CACCGAGUCGGUGCUsmUsmUsmU | |
| gRNA1599 | mUsmAsmCsUCACCUCUGCAUGCUCAGUUUUAGAGCUAGAAAUA | 480 |
| | GCAAGUUAAAAUAAGGCUAGUCCGUUAUCAACUUGAAAAAGUGG | |
| | CACCGAGUCGGUGCUsmUsmUsmU | |
| gRNA1600 | mGsmCsmAsACUUACCCAGAGGCAAAGUUUUAGAGCUAGAAAUA | 499 |
| | GCAAGUUAAAAUAAGGCUAGUCCGUUAUCAACUUGAAAAAGUGG | |
| | CACCGAGUCGGUGCUsmUsmUsmU | |
| gRNA1601 | mUsmCsmUsGUAUACUCACCUCUGCAGUUUUAGAGCUAGAAAUA | 500 |
| | GCAAGUUAAAAUAAGGCUAGUCCGUUAUCAACUUGAAAAAGUGG | |
| | CACCGAGUCGGUGCUsmUsmUsmU | |
| gRNA1602 | mGsmAsmAsACACUCACCGUAGGGCCGUUUUAGAGCUAGAAAUA | 501 |
| | GCAAGUUAAAAUAAGGCUAGUCCGUUAUCAACUUGAAAAAGUGG | |
| | CACCGAGUCGGUGCUsmUsmUsmU | |
| gRNA1603 | mCsmUsmCsUACACCCAGGGCACCGGGUUUUAGAGCUAGAAAUA | 502 |
| | GCAAGUUAAAAUAAGGCUAGUCCGUUAUCAACUUGAAAAAGUGG | |
| | CACCGAGUCGGUGCUsmUsmUsmU | |
| gRNA1604 | mAsmCsmAsCCUUAUAGGAAAACCAGGUUUUAGAGCUAGAAAUA | 503 |
| | GCAAGUUAAAAUAAGGCUAGUCCGUUAUCAACUUGAAAAAGUGG | |
| | CACCGAGUCGGUGCUsmUsmUsmU | |
| gRNA1605 | mAsmUsmAsGGAAAACCAGUGAGUCUGUUUUAGAGCUAGAAAUA | 504 |
| | GCAAGUUAAAAUAAGGCUAGUCCGUUAUCAACUUGAAAAAGUGG | |
| | CACCGAGUCGGUGCUsmUsmUsmU | |
| gRNA1606 | mAsmCsmUsCACCUCUGCAUGCUCAUGUUUUAGAGCUAGAAAUA | 481 |
| | GCAAGUUAAAAUAAGGCUAGUCCGUUAUCAACUUGAAAAAGUGG | |
| | CACCGAGUCGGUGCUsmUsmUsmU | |
| gRNA1607 | mCsmUsmCsACCGUAGGGCCAGCCUCGUUUUAGAGCUAGAAAUA | 506 |
| | GCAAGUUAAAAUAAGGCUAGUCCGUUAUCAACUUGAAAAAGUGG | |
| | CACCGAGUCGGUGCUsmUsmUsmU | |
| gRNA1746 | mAsmAsmCsCUGCUGAUUCUGAUUAUGUUUUAGAGCUAGAAAUA | 507 |
| | GCAAGUUAAAAUAAGGCUAGUCCGUUAUCAACUUGAAAAAGUGG | |
| | CACCGAGUCGGUGCUsmUsmUsmU | |
| gRNA1747 | mAsmAsmGsAGAGAAUAAGUAACCCAUGUUUUAGUACUCUGUAA | 508 |
| | UGAAAAUUACAGAAUCUACUAAAACAAGGCAAAAUGCCGUGUUU | |
| | AUCUCGUCAACUUGUUGGCGAGAUsmUsmUsmU | |
| gRNA1748 | mAsmAsmGsCAGCCUAGCUCAGGAGAAGUUUUAGUACUCUGUAA | 509 |
| | UGAAAAUUACAGAAUCUACUAAAACAAGGCAAAAUGCCGUGUUU | |
| | AUCUCGUCAACUUGUUGGCGAGAUsmUsmUsmU | |
| gRNA1749 | mAsmAsmGsUCCACUCAUUCUUGGCAGUUUUAGAGCUAGAAAUA | 510 |
| | GCAAGUUAAAAUAAGGCUAGUCCGUUAUCAACUUGAAAAAGUGG | |
| | CACCGAGUCGGUGCUsmUsmUsmU | |
| gRNA1750 | mAsmCsmGsAUGAGAAGCCAUCCUGCCGUUUUAGUACUCUGUAA | 511 |
| | UGAAAAUUACAGAAUCUACUAAAACAAGGCAAAAUGCCGUGUUU | |
| | AUCUCGUCAACUUGUUGGCGAGAUsmUsmUsmU | |
| gRNA1751 | mAsmGsmAsCAAGGUUCAUAUUUGUAGUUUUAGAGCUAGAAAUA | 512 |
| | GCAAGUUAAAAUAAGGCUAGUCCGUUAUCAACUUGAAAAAGUGG | |
| | CACCGAGUCGGUGCUsmUsmUsmU | |
| gRNA1752 | mAsmGsmGsCUGGGAGCAGCCAUCACGUUUUAGAGCUAGAAAUA | 513 |
| | GCAAGUUAAAAUAAGGCUAGUCCGUUAUCAACUUGAAAAAGUGG | |
| | CACCGAGUCGGUGCUsmUsmUsmU | |
| gRNA1753 | mAsmUsmAsAGUAACCCAUACAAAUAGUUUUAGAGCUAGAAAUA | 514 |
| | GCAAGUUAAAAUAAGGCUAGUCCGUUAUCAACUUGAAAAAGUGG | |
| | CACCGAGUCGGUGCUsmUsmUsmU | |
| gRNA1754 | mAsmUsmAsCUCACUUCUCCUGAGCUGUUUUAGAGCUAGAAAUA | 515 |
| | GCAAGUUAAAAUAAGGCUAGUCCGUUAUCAACUUGAAAAAGUGG | |
| | CACCGAGUCGGUGCUsmUsmUsmU | |
| gRNA1755 | mAsmUsmUsAUUGACUUAGUCAACAAGUUUUAGAGCUAGAAAUA | 516 |
| | GCAAGUUAAAAUAAGGCUAGUCCGUUAUCAACUUGAAAAAGUGG | |
| | CACCGAGUCGGUGCUsmUsmUsmU | |
| gRNA1756 | mCsmAsmAsAUAUGAACCUUGUCUAGGUUUUAGAGCUAGAAAUA | 517 |
| | GCAAGUUAAAAUAAGGCUAGUCCGUUAUCAACUUGAAAAAGUGG | |
| | CACCGAGUCGGUGCUsmUsmUsmU | |
| gRNA1757 | mCsmAsmGsAAGUCCACUCAUUCUUGGGUUUUAGUACUCUGUAA | 518 |
| | UGAAAAUUACAGAAUCUACUAAAACAAGGCAAAAUGCCGUGUUU | |
| | AUCUCGUCAACUUGUUGGCGAGAUsmUsmUsmU | |
| gRNA1758 | mCsmAsmGsGCUGGGAGCAGCCAUCACGUUUUAGUACUCUGUAA | 519 |
| | UGAAAAUUACAGAAUCUACUAAAACAAGGCAAAAUGCCGUGUUU | |
| | AUCUCGUCAACUUGUUGGCGAGAUsmUsmUsmU | |
| gRNA1759 | mCsmCsmAsUCCUGCCAAGAAUGAGUGUUUUAGAGCUAGAAAUA | 520 |
| | GCAAGUUAAAAUAAGGCUAGUCCGUUAUCAACUUGAAAAAGUGG | |
| | CACCGAGUCGGUGCUsmUsmUsmU | |
| gRNA1760 | mCsmCsmUsGCUGAUUCUGAUUAUUGAGUUUUAGUACUCUGUAA | 521 |
| | UGAAAAUUACAGAAUCUACUAAAACAAGGCAAAAUGCCGUGUUU | |
| | AUCUCGUCAACUUGUUGGCGAGAUsmUsmUsmU | |
| gRNA1761 | mCsmGsmAsUGCUCUAAUCUCUCUAGAGUUUUAGUACUCUGUAA | 522 |
| | UGAAAAUUACAGAAUCUACUAAAACAAGGCAAAAUGCCGUGUUU | |
| | AUCUCGUCAACUUGUUGGCGAGAUsmUsmUsmU | |
| gRNA1762 | mCsmUsmAsAGUCAAUAAUCAGAAUCAGUUUUAGUACUCUGUAA | 523 |
| | UGAAAAUUACAGAAUCUACUAAAACAAGGCAAAAUGCCGUGUUU | |
| | AUCUCGUCAACUUGUUGGCGAGAUsmUsmUsmU | |
| gRNA1763 | mCsmUsmAsGACAAGGUUCAUAUUUGUGUUUUAGUACUCUGUAA | 524 |
| | UGAAAAUUACAGAAUCUACUAAAACAAGGCAAAAUGCCGUGUUU | |
| | AUCUCGUCAACUUGUUGGCGAGAUsmUsmUsmU | |
| gRNA1764 | mGsmAsmAsCCUUGUCUAGAGAGAUUGUUUUAGAGCUAGAAAUA | 525 |
| | GCAAGUUAAAAUAAGGCUAGUCCGUUAUCAACUUGAAAAAGUGG | |
| | CACCGAGUCGGUGCUsmUsmUsmU | |
| gRNA1765 | mGsmAsmAsGUCCACUCAUUCUUGGCGUUUUAGAGCUAGAAAUA | 526 |
| | GCAAGUUAAAAUAAGGCUAGUCCGUUAUCAACUUGAAAAAGUGG | |
| | CACCGAGUCGGUGCUsmUsmUsmU | |
| gRNA1766 | mGsmAsmAsUCAGCAGGUUUGCAGUCGUUUUAGAGCUAGAAAUA | 527 |
| | GCAAGUUAAAAUAAGGCUAGUCCGUUAUCAACUUGAAAAAGUGG | |
| | CACCGAGUCGGUGCUsmUsmUsmU | |
| gRNA1767 | mGsmAsmAsUGAGUGGACUUCUGUGAGUUUUAGAGCUAGAAAUA | 528 |
| | GCAAGUUAAAAUAAGGCUAGUCCGUUAUCAACUUGAAAAAGUGG | |
| | CACCGAGUCGGUGCUsmUsmUsmU | |
| gRNA1768 | mGsmAsmCsUGCAAACCUGCUGAUUCGUUUUAGAGCUAGAAAUA | 529 |
| | GCAAGUUAAAAUAAGGCUAGUCCGUUAUCAACUUGAAAAAGUGG | |
| | CACCGAGUCGGUGCUsmUsmUsmU | |
| gRNA1769 | mGsmAsmCsUUAGUCAACAAAGAGAGAGUUUUAGUACUCUGUAA | 530 |
| | UGAAAAUUACAGAAUCUACUAAAACAAGGCAAAAUGCCGUGUUU | |
| | AUCUCGUCAACUUGUUGGCGAGAUsmUsmUsmU | |
| gRNA1770 | mGsmAsmUsAAGCAGCCUAGCUCAGGGUUUUAGAGCUAGAAAUA | 531 |
| | GCAAGUUAAAAUAAGGCUAGUCCGUUAUCAACUUGAAAAAGUGG | |
| | CACCGAGUCGGUGCUsmUsmUsmU | |
| gRNA1771 | mGsmAsmUsGAGAAGCCAUCCUGCCAGUUUUAGAGCUAGAAAUA | 532 |
| | GCAAGUUAAAAUAAGGCUAGUCCGUUAUCAACUUGAAAAAGUGG | |
| | CACCGAGUCGGUGCUsmUsmUsmU | |
| gRNA1772 | mGsmCsmCsAUCCUGCCAAGAAUGAGGUUUUAGAGCUAGAAAUA | 477 |
| | GCAAGUUAAAAUAAGGCUAGUCCGUUAUCAACUUGAAAAAGUGG | |
| | CACCGAGUCGGUGCUsmUsmUsmU | |
| gRNA1773 | mGsmCsmUsUUUAUACUCACUUCUCCGUUUUAGAGCUAGAAAUA | 534 |
| | GCAAGUUAAAAUAAGGCUAGUCCGUUAUCAACUUGAAAAAGUGG | |
| | CACCGAGUCGGUGCUsmUsmUsmU | |
| gRNA1774 | mGsmGsmASUAAGCAGCCUAGCUCAGGGUUUUAGUACUCUGUAA | 535 |
| | UGAAAAUUACAGAAUCUACUAAAACAAGGCAAAAUGCCGUGUUU | |
| | AUCUCGUCAACUUGUUGGCGAGAUsmUsmUsmU | |
| gRNA1775 | mGsmUsmCsUAGAGAGAUUAGAGCAUGUUUUAGAGCUAGAAAUA | 536 |
| | GCAAGUUAAAAUAAGGCUAGUCCGUUAUCAACUUGAAAAAGUGG | |
| | CACCGAGUCGGUGCUsmUsmUsmU | |
| gRNA1776 | mGsmUsmGsAUGGCUGCUCCCAGCCUGUUUUAGAGCUAGAAAUA | 537 |
| | GCAAGUUAAAAUAAGGCUAGUCCGUUAUCAACUUGAAAAAGUGG | |
| | CACCGAGUCGGUGCUsmUsmUsmU | |
| gRNA1777 | mUsmAsmCsUUAUUCUCUCUUUGUUGAGUUUUAGUACUCUGUAA | 538 |
| | UGAAAAUUACAGAAUCUACUAAAACAAGGCAAAAUGCCGUGUUU | |
| | AUCUCGUCAACUUGUUGGCGAGAUsmUsmUsmU | |
| gRNA1778 | mUsmAsmUsUCUCUCUUUGUUGACUAAGUUUUAGUACUCUGUAA | 539 |
| | UGAAAAUUACAGAAUCUACUAAAACAAGGCAAAAUGCCGUGUUU | |
| | AUCUCGUCAACUUGUUGGCGAGAUsmUsmUsmU | |
| gRNA1779 | mUsmAsmUsUGACUUAGUCAACAAAGGUUUUAGAGCUAGAAAUA | 540 |
| | GCAAGUUAAAAUAAGGCUAGUCCGUUAUCAACUUGAAAAAGUGG | |
| | CACCGAGUCGGUGCUsmUsmUsmU | |
| gRNA1780 | mUsmAsmUsUGACUUAGUCAACAAAGAGUUUUAGUACUCUGUAA | 541 |
| | UGAAAAUUACAGAAUCUACUAAAACAAGGCAAAAUGCCGUGUUU | |
| | AUCUCGUCAACUUGUUGGCGAGAUsmUsmUsmU | |
| gRNA1781 | mUsmCsmAsGAAUCAGCAGGUUUGCAGGUUUUAGUACUCUGUAA | 542 |
| | UGAAAAUUACAGAAUCUACUAAAACAAGGCAAAAUGCCGUGUUU | |
| | AUCUCGUCAACUUGUUGGCGAGAUsmUsmUsmU | |
| gRNA1782 | mUsmCsmCsACUCAUUCUUGGCAGGAGUUUUAGAGCUAGAAAUA | 543 |
| | GCAAGUUAAAAUAAGGCUAGUCCGUUAUCAACUUGAAAAAGUGG | |
| | CACCGAGUCGGUGCUsmUsmUsmU | |
| gRNA1783 | mUsmCsmUsCUCUUUGUUGACUAAGUCGUUUUAGUACUCUGUAA | 544 |
| | UGAAAAUUACAGAAUCUACUAAAACAAGGCAAAAUGCCGUGUUU | |
| | AUCUCGUCAACUUGUUGGCGAGAUsmUsmUsmU | |
| gRNA1784 | mUsmGsmAsGAAGCCAUCCUGCCAAGAGUUUUAGUACUCUGUAA | 545 |
| | UGAAAAUUACAGAAUCUACUAAAACAAGGCAAAAUGCCGUGUUU | |
| | AUCUCGUCAACUUGUUGGCGAGAUsmUsmUsmU | |
| gRNA1785 | mUsmGsmAsGCUAGGCUGCUUAUCCCUGUUUUAGUACUCUGUAA | 546 |
| | UGAAAAUUACAGAAUCUACUAAAACAAGGCAAAAUGCCGUGUUU | |
| | AUCUCGUCAACUUGUUGGCGAGAUsmUsmUsmU | |
| gRNA1786 | mUsmGsmAsGUAUAAAAGCCCCAGGCGUUUUAGAGCUAGAAAUA | 547 |
| | GCAAGUUAAAAUAAGGCUAGUCCGUUAUCAACUUGAAAAAGUGG | |
| | CACCGAGUCGGUGCUsmUsmUsmU | |
| gRNA1787 | mUsmGsmAsUGGCUGCUCCCAGCCUGGUUUUAGAGCUAGAAAUA | 548 |
| | GCAAGUUAAAAUAAGGCUAGUCCGUUAUCAACUUGAAAAAGUGG | |
| | CACCGAGUCGGUGCUsmUsmUsmU | |
| gRNA1788 | mUsmGsmCsCAAGAAUGAGUGGACUUCGUUUUAGUACUCUGUAA | 549 |
| | UGAAAAUUACAGAAUCUACUAAAACAAGGCAAAAUGCCGUGUUU | |
| | AUCUCGUCAACUUGUUGGCGAGAUsmUsmUsmU | |
| gRNA1789 | mUsmGsmCsCAAUCUGACUGCAAACCUGUUUUAGUACUCUGUAA | 550 |
| | UGAAAAUUACAGAAUCUACUAAAACAAGGCAAAAUGCCGUGUUU | |
| | AUCUCGUCAACUUGUUGGCGAGAUsmUsmUsmU | |
| gRNA1790 | mUsmGsmUsUGACUAAGUCAAUAAUCGUUUUAGAGCUAGAAAUA | 551 |
| | GCAAGUUAAAAUAAGGCUAGUCCGUUAUCAACUUGAAAAAGUGG | |
| | CACCGAGUCGGUGCUsmUsmUsmU | |
| gRNA1791 | mUsmUsmGsACUUAGUCAACAAAGAGGUUUUAGAGCUAGAAAUA | 552 |
| | GCAAGUUAAAAUAAGGCUAGUCCGUUAUCAACUUGAAAAAGUGG | |
| | CACCGAGUCGGUGCUsmUsmUsmU | |
| gRNA1792 | mUsmUsmUsGUUGACUAAGUCAAUAAUGUUUUAGUACUCUGUAA | 553 |
| | UGAAAAUUACAGAAUCUACUAAAACAAGGCAAAAUGCCGUGUUU | |
| | AUCUCGUCAACUUGUUGGCGAGAUsmUsmUsmU | |
| gRNA-#1 | mAsmAsmAsAGCCCCAGGCUGGGAGCGUUUUAGAGCUAGAAAUA | 554 |
| | GCAAGUUAAAAUAAGGCUAGUCCGUUAUCAACUUGAAAAAGUGG | |
| | CACCGAGUCGGUGCUsmUsmUsmU | |
| gRNA-#2 | mAsmAsmGsUGAGUAUAAAAGCCCCAGUUUUAGAGCUAGAAAUA | 555 |
| | GCAAGUUAAAAUAAGGCUAGUCCGUUAUCAACUUGAAAAAGUGG | |
| | CACCGAGUCGGUGCUsmUsmUsmU | |
| gRNA-#3 | mAsmAsmUsAAUCAGAAUCAGCAGGUUGUUUUAGUACUCUGUAA | 556 |
| | UGAAAAUUACAGAAUCUACUAAAACAAGGCAAAAUGCCGUGUUU | |
| | AUCUCGUCAACUUGUUGGCGAGAUsmUsmUsmU | |
| gRNA-#4 | mAsmAsmUsAUGAACCUUGUCUAGAGGUUUUAGAGCUAGAAAUA | 557 |
| | GCAAGUUAAAAUAAGGCUAGUCCGUUAUCAACUUGAAAAAGUGG | |
| | CACCGAGUCGGUGCUsmUsmUsmU | |
| gRNA-#5 | mAsmAsmUsGAGUGGACUUCUGUGAUGUUUUAGAGCUAGAAAUA | 558 |
| | GCAAGUUAAAAUAAGGCUAGUCCGUUAUCAACUUGAAAAAGUGG | |
| | CACCGAGUCGGUGCUsmUsmUsmU | |
| gRNA-#6 | mAsmCsmAsAAUAUGAACCUUGUCUAGGUUUUAGUACUCUGUAA | 559 |
| | UGAAAAUUACAGAAUCUACUAAAACAAGGCAAAAUGCCGUGUUU | |
| | AUCUCGUCAACUUGUUGGCGAGAUsmUsmUsmU | |
| gRNA-#7 | mAsmCsmAsGAAGUCCACUCAUUCUUGUUUUAGAGCUAGAAAUA | 560 |
| | GCAAGUUAAAAUAAGGCUAGUCCGUUAUCAACUUGAAAAAGUGG | |
| | CACCGAGUCGGUGCUsmUsmUsmU | |
| gRNA-#8 | mAsmCsmCsUUGUCUAGAGAGAUUAGGUUUUAGAGCUAGAAAUA | 561 |
| | GCAAGUUAAAAUAAGGCUAGUCCGUUAUCAACUUGAAAAAGUGG | |
| | CACCGAGUCGGUGCUsmUsmUsmU | |
| gRNA-#9 | mAsmGsmAsAGCCAUCCUGCCAAGAAGUUUUAGAGCUAGAAAUA | 562 |
| | GCAAGUUAAAAUAAGGCUAGUCCGUUAUCAACUUGAAAAAGUGG | |
| | CACCGAGUCGGUGCUsmUsmUsmU | |
| gRNA-#10 | mAsmGsmCsAGGUUUGCAGUCAGAUUGUUUUAGAGCUAGAAAUA | 563 |
| | GCAAGUUAAAAUAAGGCUAGUCCGUUAUCAACUUGAAAAAGUGG | |
| | CACCGAGUCGGUGCUsmUsmUsmU | |
| gRNA-#11 | mAsmGsmGsGAUAAGCAGCCUAGCUCGUUUUAGAGCUAGAAAUA | 564 |
| | GCAAGUUAAAAUAAGGCUAGUCCGUUAUCAACUUGAAAAAGUGG | |
| | CACCGAGUCGGUGCUsmUsmUsmU | |
| gRNA-#12 | mAsmGsmGsUUUGCAGUCAGAUUGGCGUUUUAGAGCUAGAAAUA | 565 |
| | GCAAGUUAAAAUAAGGCUAGUCCGUUAUCAACUUGAAAAAGUGG | |
| | CACCGAGUCGGUGCUsmUsmUsmU | |
| gRNA-#13 | mAsmGsmUsAUAAAAGCCCCAGGCUGGUUUUAGAGCUAGAAAUA | 566 |
| | GCAAGUUAAAAUAAGGCUAGUCCGUUAUCAACUUGAAAAAGUGG | |
| | CACCGAGUCGGUGCUsmUsmUsmU | |
| gRNA-#14 | mAsmGsmUsCAAUAAUCAGAAUCAGCGUUUUAGAGCUAGAAAUA | 567 |
| | GCAAGUUAAAAUAAGGCUAGUCCGUUAUCAACUUGAAAAAGUGG | |
| | CACCGAGUCGGUGCUsmUsmUsmU | |
| gRNA-#15 | mAsmUsmAsAUCAGAAUCAGCAGGUUGUUUUAGAGCUAGAAAUA | 568 |
| | GCAAGUUAAAAUAAGGCUAGUCCGUUAUCAACUUGAAAAAGUGG | |
| | CACCGAGUCGGUGCUsmUsmUsmU | |
| gRNA-#16 | mGsmUsmUsCUGUCUUUUGGUCAGGACAACCGUCUAGCUAUAAG | 569 |
| | UGCUGCAGGGUGUGAGAAACUCCUAUUGCUGGACGAUGUCUCUU | |
| | ACGAGGCAUUAGCACUUGACUUAGUCAACAAAGAsmGsmAsmG | |
| gRNA-#17 | mGsmUsmUsCUGUCUUUUGGUCAGGACAACCGUCUAGCUAUAAG | 570 |
| | UGCUGCAGGGUGUGAGAAACUCCUAUUGCUGGACGAUGUCUCUU | |
| | ACGAGGCAUUAGCACUCUCUUUGUUGACUAAGUCsmAsmAsmU | |
| gRNA-#18 | mGsmUsmUsCUGUCUUUUGGUCAGGACAACCGUCUAGCUAUAAG | 571 |
| | UGCUGCAGGGUGUGAGAAACUCCUAUUGCUGGACGAUGUCUCUU | |
| | ACGAGGCAUUAGCACUGAUUAUUGACUUAGUCAAsmCsmAsmA | |
| gRNA-#19 | mGsmUsmUsCUGUCUUUUGGUCAGGACAACCGUCUAGCUAUAAG | 485 |
| | UGCUGCAGGGUGUGAGAAACUCCUAUUGCUGGACGAUGUCUCUU | |
| | ACGAGGCAUUAGCACUUGGCAGGAUGGCUUCUCAsmUsmCsmG | |
| gRNA-#20 | mGsmUsmUsCUGUCUUUUGGUCAGGACAACCGUCUAGCUAUAAG | 573 |
| | UGCUGCAGGGUGUGAGAAACUCCUAUUGCUGGACGAUGUCUCUU | |
| | ACGAGGCAUUAGCACACUUAGUCAACAAAGAGAGsmAsmAsmU | |
| gRNA-#21 | mGsmUsmUsCUGUCUUUUGGUCAGGACAACCGUCUAGCUAUAAG | 574 |
| | UGCUGCAGGGUGUGAGAAACUCCUAUUGCUGGACGAUGUCUCUU | |
| | ACGAGGCAUUAGCACGCAGGGAUAAGCAGCCUAGsmCsmUsmC | |
| gRNA-#22 | mGsmUsmUsCUGUCUUUUGGUCAGGACAACCGUCUAGCUAUAAG | 575 |
| | UGCUGCAGGGUGUGAGAAACUCCUAUUGCUGGACGAUGUCUCUU | |
| | ACGAGGCAUUAGCACGUAUGGGUUACUUAUUCUCsmUsmCsmU | |
| gRNA-#23 | mCsmAsmAsGAAUGAGUGGACUUCUGGUUUUAGAGCUAGAAAUA | 576 |
| | GCAAGUUAAAAUAAGGCUAGUCCGUUAUCAACUUGAAAAAGUGG | |
| | CACCGAGUCGGUGCUsmUsmUsmU | |
| gRNA-#24 | mCsmAsmAsUCUGACUGCAAACCUGCGUUUUAGAGCUAGAAAUA | 577 |
| | GCAAGUUAAAAUAAGGCUAGUCCGUUAUCAACUUGAAAAAGUGG | |
| | CACCGAGUCGGUGCUsmUsmUsmU | |
| gRNA-#25 | mCsmAsmCsAGAAGUCCACUCAUUCUGUUUUAGAGCUAGAAAUA | 578 |
| | GCAAGUUAAAAUAAGGCUAGUCCGUUAUCAACUUGAAAAAGUGG | |
| | CACCGAGUCGGUGCUsmUsmUsmU | |
| gRNA-#26 | mCsmAsmGsACGAUGAGAAGCCAUCCGUUUUAGAGCUAGAAAUA | 579 |
| | GCAAGUUAAAAUAAGGCUAGUCCGUUAUCAACUUGAAAAAGUGG | |
| | CACCGAGUCGGUGCUsmUsmUsmU | |
| gRNA-#27 | mCsmAsmGsCAGGUUUGCAGUCAGAUGUUUUAGAGCUAGAAAUA | 580 |
| | GCAAGUUAAAAUAAGGCUAGUCCGUUAUCAACUUGAAAAAGUGG | |
| | CACCGAGUCGGUGCUsmUsmUsmU | |
| gRNA-#28 | mCsmAsmGsGAUGGCUUCUCAUCGUCGUUUUAGAGCUAGAAAUA | 581 |
| | GCAAGUUAAAAUAAGGCUAGUCCGUUAUCAACUUGAAAAAGUGG | |
| | CACCGAGUCGGUGCUsmUsmUsmU | |
| gRNA-#29 | mCsmAsmGsGUUUGCAGUCAGAUUGGCGUUUUAGUACUCUGUAA | 582 |
| | UGAAAAUUACAGAAUCUACUAAAACAAGGCAAAAUGCCGUGUUU | |
| | AUCUCGUCAACUUGUUGGCGAGAUsmUsmUsmU | |
| gRNA-#30 | mCsmAsmGsUCAGAUUGGCAGGGAUAGUUUUAGAGCUAGAAAUA | 583 |
| | GCAAGUUAAAAUAAGGCUAGUCCGUUAUCAACUUGAAAAAGUGG | |
| | CACCGAGUCGGUGCUsmUsmUsmU | |
| gRNA-#31 | mCsmCsmAsCUCAUUCUUGGCAGGAUGUUUUAGAGCUAGAAAUA | 584 |
| | GCAAGUUAAAAUAAGGCUAGUCCGUUAUCAACUUGAAAAAGUGG | |
| | CACCGAGUCGGUGCUsmUsmUsmU | |
| gRNA-#32 | mCsmUsmAsAGUCAAUAAUCAGAAUCGUUUUAGAGCUAGAAAUA | 585 |
| | GCAAGUUAAAAUAAGGCUAGUCCGUUAUCAACUUGAAAAAGUGG | |
| | CACCGAGUCGGUGCUsmUsmUsmU | |
| gRNA-#33 | mGsmUsmUsCUGUCUUUUGGUCAGGACAACCGUCUAGCUAUAAG | 586 |
| | UGCUGCAGGGUGUGAGAAACUCCUAUUGCUGGACGAUGUCUCUU | |
| | ACGAGGCAUUAGCACGUCAACAAAGAGAGAAUAAsmGsmUsmA | |
| gRNA-#34 | mCsmUsmUsAUCCCUGCCAAUCUGACGUUUUAGAGCUAGAAAUA | 587 |
| | GCAAGUUAAAAUAAGGCUAGUCCGUUAUCAACUUGAAAAAGUGG | |
| | CACCGAGUCGGUGCUsmUsmUsmU | |
| gRNA-#35 | mGsmUsmUsCUGUCUUUUGGUCAGGACAACCGUCUAGCUAUAAG | 588 |
| | UGCUGCAGGGUGUGAGAAACUCCUAUUGCUGGACGAUGUCUCUU | |
| | ACGAGGCAUUAGCACUCCCUGCCAAUCUGACUGCsmAsmAsmA | |
| gRNA-#36 | mGsmUsmUsCUGUCUUUUGGUCAGGACAACCGUCUAGCUAUAAG | 589 |
| | UGCUGCAGGGUGUGAGAAACUCCUAUUGCUGGACGAUGUCUCUU | |
| | ACGAGGCAUUAGCACUUCUCUCUUUGUUGACUAAsmGsmUsmC | |
| gRNA-#37 | mGsmUsmUsCUGUCUUUUGGUCAGGACAACCGUCUAGCUAUAAG | 590 |
| | UGCUGCAGGGUGUGAGAAACUCCUAUUGCUGGACGAUGUCUCUU | |
| | ACGAGGCAUUAGCACUCCUGAGCUAGGCUGCUUAsmUsmCsmC | |
| gRNA-#38 | mCsmUsmUsCUGUGAUGGCUGCUCCCGUUUUAGAGCUAGAAAUA | 591 |
| | GCAAGUUAAAAUAAGGCUAGUCCGUUAUCAACUUGAAAAAGUGG | |
| | CACCGAGUCGGUGCUsmUsmUsmU | |
| gRNA-#39 | mGsmUsmUsCUGUCUUUUGGUCAGGACAACCGUCUAGCUAUAAG | 592 |
| | UGCUGCAGGGUGUGAGAAACUCCUAUUGCUGGACGAUGUCUCUU | |
| | ACGAGGCAUUAGCACUGUGAUGGCUGCUCCCAGCsmCsmUsmG | |
| gRNA-#40 | mGsmUsmUsCUGUCUUUUGGUCAGGACAACCGUCUAGCUAUAAG | 593 |
| | UGCUGCAGGGUGUGAGAAACUCCUAUUGCUGGACGAUGUCUCUU | |
| | ACGAGGCAUUAGCACGCAGGAUGGCUUCUCAUCGsmUsmCsmU | |
| gRNA-#41 | mGsmUsmUsCUGUCUUUUGGUCAGGACAACCGUCUAGCUAUAAG | 594 |
| | UGCUGCAGGGUGUGAGAAACUCCUAUUGCUGGACGAUGUCUCUU | |
| | ACGAGGCAUUAGCACUCUAGAGAGAUUAGAGCAUsmCsmGsmG | |
| gRNA-#42 | mGsmUsmUsCUGUCUUUUGGUCAGGACAACCGUCUAGCUAUAAG | 595 |
| | UGCUGCAGGGUGUGAGAAACUCCUAUUGCUGGACGAUGUCUCUU | |
| | ACGAGGCAUUAGCACGUUGACUAAGUCAAUAAUCsmAsmGsmA | |
| gRNA-#43 | mGsmUsmUsCUGUCUUUUGGUCAGGACAACCGUCUAGCUAUAAG | 596 |
| | UGCUGCAGGGUGUGAGAAACUCCUAUUGCUGGACGAUGUCUCUU | |
| | ACGAGGCAUUAGCACUAUACUCACUUCUCCUGAGsmCsmUsmA | |
| gRNA-#44 | mGsmAsmAsGUGAGUAUAAAAGCCCCGUUUUAGAGCUAGAAAUA | 597 |
| | GCAAGUUAAAAUAAGGCUAGUCCGUUAUCAACUUGAAAAAGUGG | |
| | CACCGAGUCGGUGCUsmUsmUsmU | |
| gRNA-#45 | mGsmAsmCsAAGGUUCAUAUUUGUAUGUUUUAGAGCUAGAAAUA | 598 |
| | GCAAGUUAAAAUAAGGCUAGUCCGUUAUCAACUUGAAAAAGUGG | |
| | CACCGAGUCGGUGCUsmUsmUsmU | |
| gRNA-#46 | mGsmAsmGsUAUAAAAGCCCCAGGCUGUUUUAGAGCUAGAAAUA | 599 |
| | GCAAGUUAAAAUAAGGCUAGUCCGUUAUCAACUUGAAAAAGUGG | |
| | CACCGAGUCGGUGCUsmUsmUsmU | |
| gRNA-#47 | mGsmAsmGsUGGACUUCUGUGAUGGCGUUUUAGAGCUAGAAAUA | 600 |
| | GCAAGUUAAAAUAAGGCUAGUCCGUUAUCAACUUGAAAAAGUGG | |
| | CACCGAGUCGGUGCUsmUsmUsmU | |
| gRNA-#48 | mGsmAsmUsGGCUGCUCCCAGCCUGGGUUUUAGAGCUAGAAAUA | 601 |
| | GCAAGUUAAAAUAAGGCUAGUCCGUUAUCAACUUGAAAAAGUGG | |
| | CACCGAGUCGGUGCUsmUsmUsmU | |
| gRNA-#49 | mGsmCsmAsGCCUAGCUCAGGAGAAGGUUUUAGAGCUAGAAAUA | 602 |
| | GCAAGUUAAAAUAAGGCUAGUCCGUUAUCAACUUGAAAAAGUGG | |
| | CACCGAGUCGGUGCUsmUsmUsmU | |
| gRNA-#50 | mGsmCsmUsGCUUAUCCCUGCCAAUCGUUUUAGAGCUAGAAAUA | 603 |
| | GCAAGUUAAAAUAAGGCUAGUCCGUUAUCAACUUGAAAAAGUGG | |
| | CACCGAGUCGGUGCUsmUsmUsmU | |
| gRNA-#51 | mGsmGsmGsAUAAGCAGCCUAGCUCAGUUUUAGAGCUAGAAAUA | 604 |
| | GCAAGUUAAAAUAAGGCUAGUCCGUUAUCAACUUGAAAAAGUGG | |
| | CACCGAGUCGGUGCUsmUsmUsmU | |
| gRNA-#52 | mGsmGsmUsUUGCAGUCAGAUUGGCAGUUUUAGAGCUAGAAAUA | 605 |
| | GCAAGUUAAAAUAAGGCUAGUCCGUUAUCAACUUGAAAAAGUGG | |
| | CACCGAGUCGGUGCUsmUsmUsmU | |
| gRNA-#53 | mGsmUsmUsACUUAUUCUCUCUUUGUGUUUUAGAGCUAGAAAUA | 606 |
| | GCAAGUUAAAAUAAGGCUAGUCCGUUAUCAACUUGAAAAAGUGG | |
| | CACCGAGUCGGUGCUsmUsmUsmU | |
| gRNA-#54 | mGsmUsmUsCUGUCUUUUGGUCAGGACAACCGUCUAGCUAUAAG | 607 |
| | UGCUGCAGGGUGUGAGAAACUCCUAUUGCUGGACGAUGUCUCUU | |
| | ACGAGGCAUUAGCACCUUAUUCUCUCUUUGUUGAsmCsmUsmA | |
| gRNA-#55 | mGsmUsmUsCUGUCUUUUGGUCAGGACAACCGUCUAGCUAUAAG | 608 |
| | UGCUGCAGGGUGUGAGAAACUCCUAUUGCUGGACGAUGUCUCUU | |
| | ACGAGGCAUUAGCACAUAUUUGUAUGGGUUACUUsmAsmUsmU | |
| gRNA-#56 | mGsmUsmUsCUGUCUUUUGGUCAGGACAACCGUCUAGCUAUAAG | 609 |
| | UGCUGCAGGGUGUGAGAAACUCCUAUUGCUGGACGAUGUCUCUU | |
| | ACGAGGCAUUAGCACACUAAGUCAAUAAUCAGAAsmUsmCsmA | |
| gRNA-#57 | mGsmUsmUsUGCAGUCAGAUUGGCAGGUUUUAGAGCUAGAAAUA | 610 |
| | GCAAGUUAAAAUAAGGCUAGUCCGUUAUCAACUUGAAAAAGUGG | |
| | CACCGAGUCGGUGCUsmUsmUsmU | |
| gRNA-#58 | mGsmUsmUsCUGUCUUUUGGUCAGGACAACCGUCUAGCUAUAAG | 611 |
| | UGCUGCAGGGUGUGAGAAACUCCUAUUGCUGGACGAUGUCUCUU | |
| | ACGAGGCAUUAGCACGCAGUCAGAUUGGCAGGGAsmUsmAsmA | |
| gRNA-#59 | mUsmAsmCsAAAUAUGAACCUUGUCUGUUUUAGAGCUAGAAAUA | 612 |
| | GCAAGUUAAAAUAAGGCUAGUCCGUUAUCAACUUGAAAAAGUGG | |
| | CACCGAGUCGGUGCUsmUsmUsmU | |
| gRNA-#60 | mUsmAsmCsUCACUUCUCCUGAGCUAGUUUUAGAGCUAGAAAUA | 613 |
| | GCAAGUUAAAAUAAGGCUAGUCCGUUAUCAACUUGAAAAAGUGG | |
| | CACCGAGUCGGUGCUsmUsmUsmU | |
| gRNA-#61 | mUsmAsmUsAAAAGCCCCAGGCUGGGGUUUUAGAGCUAGAAAUA | 614 |
| | GCAAGUUAAAAUAAGGCUAGUCCGUUAUCAACUUGAAAAAGUGG | |
| | CACCGAGUCGGUGCUsmUsmUsmU | |
| gRNA-#62 | mUsmCsmAsCUUCUCCUGAGCUAGGCGUUUUAGAGCUAGAAAUA | 615 |
| | GCAAGUUAAAAUAAGGCUAGUCCGUUAUCAACUUGAAAAAGUGG | |
| | CACCGAGUCGGUGCUsmUsmUsmU | |
| gRNA-#63 | mUsmCsmAsGAUUGGCAGGGAUAAGCGUUUUAGAGCUAGAAAUA | 616 |
| | GCAAGUUAAAAUAAGGCUAGUCCGUUAUCAACUUGAAAAAGUGG | |
| | CACCGAGUCGGUGCUsmUsmUsmU | |
| gRNA-#64 | mUsmCsmAsGGAGAAGUGAGUAUAAAGUUUUAGAGCUAGAAAUA | 617 |
| | GCAAGUUAAAAUAAGGCUAGUCCGUUAUCAACUUGAAAAAGUGG | |
| | CACCGAGUCGGUGCUsmUsmUsmU | |
| gRNA-#65 | mUsmCsmUsGACUGCAAACCUGCUGAUGUUUUAGUACUCUGUAA | 618 |
| | UGAAAAUUACAGAAUCUACUAAAACAAGGCAAAAUGCCGUGUUU | |
| | AUCUCGUCAACUUGUUGGCGAGAUsmUsmUsmU | |
| gRNA-#66 | mUsmGsmAsGCUAGGCUGCUUAUCCCGUUUUAGAGCUAGAAAUA | 619 |
| | GCAAGUUAAAAUAAGGCUAGUCCGUUAUCAACUUGAAAAAGUGG | |
| | CACCGAGUCGGUGCUsmUsmUsmU | |
| gRNA-#67 | mUsmGsmCsCAAUCUGACUGCAAACCGUUUUAGAGCUAGAAAUA | 620 |
| | GCAAGUUAAAAUAAGGCUAGUCCGUUAUCAACUUGAAAAAGUGG | |
| | CACCGAGUCGGUGCUsmUsmUsmU | |
| gRNA-#68 | mUsmGsmCsUCUAAUCUCUCUAGACAGUUUUAGAGCUAGAAAUA | 621 |
| | GCAAGUUAAAAUAAGGCUAGUCCGUUAUCAACUUGAAAAAGUGG | |
| | CACCGAGUCGGUGCUsmUsmUsmU | |
| gRNA-#69 | mUsmGsmUsGAUGGCUGCUCCCAGCCGUUUUAGAGCUAGAAAUA | 622 |
| | GCAAGUUAAAAUAAGGCUAGUCCGUUAUCAACUUGAAAAAGUGG | |
| | CACCGAGUCGGUGCUsmUsmUsmU | |
| gRNA-#70 | mUsmUsmGsGCAGGGAUAAGCAGCCUGUUUUAGAGCUAGAAAUA | 623 |
| | GCAAGUUAAAAUAAGGCUAGUCCGUUAUCAACUUGAAAAAGUGG | |
| | CACCGAGUCGGUGCUsmUsmUsmU | |
| gRNA-#71 | mUsmUsmUsUAUACUCACUUCUCCUGGUUUUAGAGCUAGAAAUA | 624 |
| | GCAAGUUAAAAUAAGGCUAGUCCGUUAUCAACUUGAAAAAGUGG | |
| | CACCGAGUCGGUGCUsmUsmUsmU | |

Lowercase m indicates 2′-O-methylated nucleobases (e.g., mA, mC, mG, mU), and “s” indicates phosphorothioates.

TABLE 2A
Exemplary Spacer and Target Site Sequences.¹

| | | | | Target site | | |
|---|---|---|---|---|---|---|
| | | | | sequence (target | | |
| | | SEQ | Target | bases for base | SEQ | |
| | Spacer | ID | site | editing are in bold | ID | Target |
| sgRNA | sequence | NO | ID | and underlined) | NO | Base(s) |
| sgRNA_361 | UAUAGGAAAACCA | 475 | TSBTx2602 | TATAGGAAAACCAGTG | 469 | 4A |
| | GUGAGUC | | | AGTC | | |
| sgRNA_362 | UACUCACCUCUGC | 476 | TSBTx2603 | TACTCACCTCTGCATG | 470 | 6A, |
| | AUGCUCA | | | CTCA | | 7C |
| sgRNA_363 | ACUCACCUCUGCA | 625 | TSBTx2604 | ACTCACCTCTGCATGC | 639 | 5A, |
| | UGCUCAU | | | TCAT | | 6C |
| sgRNA_364 | UACCACCUAUGAG | 626 | TSBTx2605 | TACCACCTATGAGAGA | 640 | 7C |
| | AGAAGAC | | | AGAC | | |
| sgRNA_365 | AUACUCACCUCUG | 627 | TSBTx2606 | ATACTCACCTCTGCAT | 641 | 7A, |
| | CAUGCUCA | | | GCTCA | | 8C |
| sgRNA_366 | ACUGGUUUUCCUA | 628 | TSBTx2607 | ACTGGTTTTCCTATAA | 642 | 11C |
| | UAAGGUGU | | | GGTGT | | |
| sgRNA_367 | UUGGCAGGAUGGC | 629 | TSBTx2608 | TTGGCAGGATGGCTTC | 643 | 6A, |
| | UUCUCAUCG | | | TCATCG | | 9A |
| sgRNA_368 | UCCUAUAAGGUGU | 630 | TSBTx2609 | GTTTTCCTATAAGGTG | 644 | |
| | GAAAGUCUG | | | TGAAAGTCTG | | |
| sgRNA_369 | UGAGCCCAUGCAG | 631 | TSBTx2610 | GTTGTGAGCCCATGCA | 645 | |
| | CUCUCCAGA | | | GCTCTCCAGA | | |
| sgRNA_370 | CUCCUCAGUUGUG | 632 | TSBTx2611 | ATTCCTCCTCAGTTGT | 646 | |
| | AGCCCAUGC | | | GAGCCCATGC | | |
| sgRNA_371 | GUAGAAGGGAUAU | 633 | TSBTx2612 | ATTTGTAGAAGGGATA | 647 | |
| | ACAAAGUGG | | | TACAAAGTGG | | |
| sgRNA_372 | CCACUUUGUAUAU | 634 | TSBTx2613 | ATTTCCACTTTGTATA | 648 | |
| | CCCUUCUAC | | | TCCCTTCTAC | | |
| sgRNA_373 | GGUGUCUAUUUCC | 635 | TSBTx2614 | ATTTGGTGTCTATTTC | 649 | |
| | ACUUUGUAU | | | CACTTTGTAT | | |
| sgRNA_374 | CAUGAGCAUGCAG | 636 | TSBTx2615 | ATTCCATGAGCATGCA | 650 | |
| | AGGUGAGUA | | | GAGGTGAGTA | | |
| sgRNA_375 | GGCUAUCGUCACC | 637 | | GGCTATCGTCACCAAT | 651 | 5A |
| | AAUCCCA | | | CCCA | | |
| sgRNA_376 | GCUAUCGUCACCA | 638 | | GCTATCGTCACCAATC | 652 | 4A |
| | AUCCCAA | | | CCAA | | |
| sgRNA_377 | GGCUAUCGUCACC | 637 | | GGCTATCGTCACCAAT | 651 | 5A |
| | AAUCCCA | | | CCCA | | |

1One of skill in the art will understand that some of the target site sequences correspond to a reverse-complement to the above-provided transthyretin polynucleotide sequence; i.e., the target sequences may correspond to either strand of a dsDNA molecule encoding a transthyretin polynucleotide. Further, it is to be understood that a C base can be targeted by a cytidine deaminase and that an A base can be targeted by an adenine deaminase.

TABLE 2B
Exemplary Spacer and Target Site Sequences.

| | | SEQ | Target Site/ | SEQ |
|---|---|---|---|---|
| gRNA_ | Spacer | ID | Protospacer | ID |
| Name | Sequence | NO: | Sequence | NO: |
| gRNA1747 | AAGAGAGAAUAAGU | 472 | AAGAGAGAATAAGTAA | 785 |
| | AACCCAU | | CCCAT | |
| gRNA1748 | AAGCAGCCUAGCUC | 654 | AAGCAGCCTAGCTCAG | 786 |
| | AGGAGAA | | GAGAA | |
| gRNA1749 | AAGUCCACUCAUUC | 655 | AAGTCCACTCATTCTT | 787 |
| | UUGGCA | | GGCA | |
| gRNA1750 | ACGAUGAGAAGCCA | 656 | ACGATGAGAAGCCATC | 788 |
| | UCCUGCC | | CTGCC | |
| gRNA1751 | AGACAAGGUUCAUA | 657 | AGACAAGGTTCATATT | 789 |
| | UUUGUA | | TGTA | |
| gRNA1752 | AGGCUGGGAGCAGC | 658 | AGGCTGGGAGCAGCCA | 790 |
| | CAUCAC | | TCAC | |
| gRNA1753 | AUAAGUAACCCAUA | 659 | ATAAGTAACCCATACA | 791 |
| | CAAAUA | | AATA | |
| gRNA1754 | AUACUCACUUCUCC | 660 | ATACTCACTTCTCCTG | 792 |
| | UGAGCU | | AGCT | |
| gRNA1755 | AUUAUUGACUUAGU | 661 | ATTATTGACTTAGTCA | 793 |
| | CAACAA | | ACAA | |
| gRNA1756 | CAAAUAUGAACCUU | 662 | CAAATATGAACCTTGT | 794 |
| | GUCUAG | | CTAG | |
| gRNA1757 | CAGAAGUCCACUCA | 663 | CAGAAGTCCACTCATT | 795 |
| | UUCUUGG | | CTTGG | |
| gRNA1758 | CAGGCUGGGAGCAG | 664 | CAGGCTGGGAGCAGCC | 796 |
| | CCAUCAC | | ATCAC | |
| gRNA1759 | CCAUCCUGCCAAGA | 665 | CCATCCTGCCAAGAAT | 797 |
| | AUGAGU | | GAGT | |
| gRNA1760 | CCUGCUGAUUCUGA | 666 | CCTGCTGATTCTGATT | 798 |
| | UUAUUGA | | ATTGA | |
| gRNA1761 | CGAUGCUCUAAUCU | 667 | CGATGCTCTAATCTCT | 799 |
| | CUCUAGA | | CTAGA | |
| gRNA1762 | CUAAGUCAAUAAUC | 668 | CTAAGTCAATAATCAG | 800 |
| | AGAAUCA | | AATCA | |
| gRNA1763 | CUAGACAAGGUUCA | 669 | CTAGACAAGGTTCATA | 801 |
| | UAUUUGU | | TTTGT | |
| gRNA1764 | GAACCUUGUCUAGA | 670 | GAACCTTGTCTAGAGA | 802 |
| | GAGAUU | | GATT | |
| gRNA1765 | GAAGUCCACUCAUU | 671 | GAAGTCCACTCATTCT | 803 |
| | CUUGGC | | TGGC | |
| gRNA1766 | GAAUCAGCAGGUUU | 672 | GAATCAGCAGGTTTGC | 804 |
| | GCAGUC | | AGTC | |
| gRNA1767 | GAAUGAGUGGACUU | 673 | GAATGAGTGGACTTCT | 805 |
| | CUGUGA | | GTGA | |
| gRNA1768 | GACUGCAAACCUGC | 674 | GACTGCAAACCTGCTG | 806 |
| | UGAUUC | | ATTC | |
| gRNA1769 | GACUUAGUCAACAA | 675 | GACTTAGTCAACAAAG | 807 |
| | AGAGAGA | | AGAGA | |
| gRNA1770 | GAUAAGCAGCCUAG | 676 | GATAAGCAGCCTAGCT | 808 |
| | CUCAGG | | CAGG | |
| gRNA1771 | GAUGAGAAGCCAUC | 677 | GATGAGAAGCCATCCT | 809 |
| | CUGCCA | | GCCA | |
| gRNA1772 | GCCAUCCUGCCAAG | 472 | GCCATCCTGCCAAGAA | 467 |
| | AAUGAG | | TGAG | |
| gRNA1773 | GCUUUUAUACUCAC | 654 | GCTTTTATACTCACTT | 811 |
| | UUCUCC | | CTCC | |
| gRNA1774 | GGAUAAGCAGCCUA | 655 | GGATAAGCAGCCTAGC | 812 |
| | GCUCAGG | | TCAGG | |
| gRNA1775 | GUCUAGAGAGAUUA | 656 | GTCTAGAGAGATTAGA | 813 |
| | GAGCAU | | GCAT | |
| gRNA1776 | GUGAUGGCUGCUCC | 657 | GTGATGGCTGCTCCCA | 814 |
| | CAGCCU | | GCCT | |
| gRNA1777 | UACUUAUUCUCUCU | 658 | TACTTATTCTCTCTTT | 815 |
| | UUGUUGA | | GTTGA | |
| gRNA1778 | UAUUCUCUCUUUGU | 659 | TATTCTCTCTTTGTTG | 816 |
| | UGACUAA | | ACTAA | |
| gRNA1779 | UAUUGACUUAGUCA | 660 | TATTGACTTAGTCAAC | 817 |
| | ACAAAG | | AAAG | |
| gRNA1780 | UAUUGACUUAGUCA | 661 | TATTGACTTAGTCAAC | 818 |
| | ACAAAGA | | AAAGA | |
| gRNA1781 | UCAGAAUCAGCAGG | 662 | TCAGAATCAGCAGGTT | 819 |
| | UUUGCAG | | TGCAG | |
| gRNA1782 | UCCACUCAUUCUUG | 663 | TCCACTCATTCTTGGC | 820 |
| | GCAGGA | | AGGA | |
| gRNA1783 | UCUCUCUUUGUUGA | 664 | TCTCTCTTTGTTGACT | 821 |
| | CUAAGUC | | AAGTC | |
| gRNA1784 | UGAGAAGCCAUCCU | 665 | TGAGAAGCCATCCTGC | 822 |
| | GCCAAGA | | CAAGA | |
| gRNA1785 | UGAGCUAGGCUGCU | 666 | TGAGCTAGGCTGCTTA | 823 |
| | UAUCCCU | | TCCCT | |
| gRNA1786 | UGAGUAUAAAAGCC | 667 | TGAGTATAAAAGCCCC | 824 |
| | CCAGGC | | AGGC | |
| gRNA1787 | UGAUGGCUGCUCCC | 668 | TGATGGCTGCTCCCAG | 825 |
| | AGCCUG | | CCTG | |
| gRNA1788 | UGCCAAGAAUGAGU | 669 | TGCCAAGAATGAGTGG | 826 |
| | GGACUUC | | ACTTC | |
| gRNA1789 | UGCCAAUCUGACUG | 670 | TGCCAATCTGACTGCA | 827 |
| | CAAACCU | | AACCT | |
| gRNA1790 | UGUUGACUAAGUCA | 671 | TGTTGACTAAGTCAAT | 828 |
| | AUAAUC | | AATC | |
| gRNA1791 | UUGACUUAGUCAAC | 672 | TTGACTTAGTCAACAA | 829 |
| | AAAGAG | | AGAG | |
| gRNA1792 | UUUGUUGACUAAGU | 673 | TTTGTTGACTAAGTCA | 830 |
| | CAAUAAU | | ATAAT | |
| gRNA1746 | AACCUGCUGAUUCU | 674 | AACCTGCTGATTCTGA | 831 |
| | GAUUAU | | TTAT | |
| gRNA1594 | CAACUUACCCAGAG | 675 | CAACTTACCCAGAGGC | 832 |
| | GCAAAU | | AAAT | |
| gRNA1595 | AAUGGCUCCCAGGU | 676 | AATGGCTCCCAGGTGT | 833 |
| | GUCAUC | | CATC | |
| gRNA1596 | GGCUCCCAGGUGUC | 677 | GGCTCCCAGGTGTCAT | 834 |
| | AUCAGC | | CAGC | |
| gRNA1597 | CUCUCAUAGGUGGU | 653 | CTCTCATAGGTGGTAT | 835 |
| | AUUCAC | | TCAC | |
| gRNA1598 | UAUAGGAAAACCAG | 475 | TATAGGAAAACCAGTG | 469 |
| | UGAGUC | | AGTC | |
| gRNA1599 | UACUCACCUCUGCA | 476 | TACTCACCTCTGCATG | 470 |
| | UGCUCA | | CTCA | |
| gRNA1600 | GCAACUUACCCAGA | 474 | GCAACTTACCCAGAGG | 468 |
| | GGCAAA | | CAAA | |
| gRNA1601 | UCUGUAUACUCACC | 707 | TCTGTATACTCACCTC | 836 |
| | UCUGCA | | TGCA | |
| gRNA1602 | GAAACACUCACCGU | 708 | GAAACACTCACCGTAG | 837 |
| | AGGGCC | | GGCC | |
| gRNA1603 | CUCUACACCCAGGG | 709 | CTCTACACCCAGGGCA | 838 |
| | CACCGG | | CCGG | |
| gRNA1604 | ACACCUUAUAGGAA | 710 | ACACCTTATAGGAAAA | 839 |
| | AACCAG | | CCAG | |
| gRNA1605 | AUAGGAAAACCAGU | 711 | ATAGGAAAACCAGTGA | 840 |
| | GAGUCU | | GTCT | |
| gRNA1606 | ACUCACCUCUGCAU | 625 | ACTCACCTCTGCATGC | 639 |
| | GCUCAU | | TCAT | |
| gRNA1607 | CUCACCGUAGGGCC | 713 | CTCACCGTAGGGCCAG | 841 |
| | AGCCUC | | CCTC | |
| gRNA-#1 | AAAAGCCCCAGGCU | 714 | AAAAGCCCCAGGCTGG | 842 |
| | GGGAGC | | GAGC | |
| gRNA-#2 | AAGUGAGUAUAAAA | 715 | AAGTGAGTATAAAAGC | 843 |
| | GCCCCA | | CCCA | |
| gRNA-#3 | AAUAAUCAGAAUCA | 716 | AATAATCAGAATCAGC | 844 |
| | GCAGGUU | | AGGTT | |
| gRNA-#4 | AAUAUGAACCUUGU | 717 | AATATGAACCTTGTCT | 845 |
| | CUAGAG | | AGAG | |
| gRNA-#5 | AAUGAGUGGACUUC | 718 | AATGAGTGGACTTCTG | 846 |
| | UGUGAU | | TGAT | |
| gRNA-#6 | ACAAAUAUGAACCU | 719 | ACAAATATGAACCTTG | 847 |
| | UGUCUAG | | TCTAG | |
| gRNA-#7 | ACAGAAGUCCACUC | 720 | ACAGAAGTCCACTCAT | 848 |
| | AUUCUU | | TCTT | |
| gRNA-#8 | ACCUUGUCUAGAGA | 721 | ACCTTGTCTAGAGAGA | 849 |
| | GAUUAG | | TTAG | |
| gRNA-#9 | AGAAGCCAUCCUGC | 722 | AGAAGCCATCCTGCCA | 850 |
| | CAAGAA | | AGAA | |
| gRNA-#10 | AGCAGGUUUGCAGU | 723 | AGCAGGTTTGCAGTCA | 851 |
| | CAGAUU | | GATT | |
| gRNA-#11 | AGGGAUAAGCAGCC | 724 | AGGGATAAGCAGCCTA | 852 |
| | UAGCUC | | GCTC | |
| gRNA-#12 | AGGUUUGCAGUCAG | 725 | AGGTTTGCAGTCAGAT | 853 |
| | AUUGGC | | TGGC | |
| gRNA-#13 | AGUAUAAAAGCCCC | 726 | AGTATAAAAGCCCCAG | 854 |
| | AGGCUG | | GCTG | |
| gRNA-#14 | AGUCAAUAAUCAGA | 727 | AGTCAATAATCAGAAT | 855 |
| | AUCAGC | | CAGC | |
| gRNA-#15 | AUAAUCAGAAUCAG | 728 | ATAATCAGAATCAGCA | 856 |
| | CAGGUU | | GGTT | |
| gRNA-#16 | UUGACUUAGUCAAC | 729 | TTGACTTAGTCAACAA | 857 |
| | AAAGAGAG | | AGAGAG | |
| gRNA-#17 | UCUCUUUGUUGACU | 730 | TCTCTTTGTTGACTAA | 858 |
| | AAGUCAAU | | GTCAAT | |
| gRNA-#18 | UGAUUAUUGACUUA | 731 | TGATTATTGACTTAGT | 859 |
| | GUCAACAA | | CAACAA | |
| gRNA-#19 | UUGGCAGGAUGGCU | 629 | TTGGCAGGATGGCTTC | 643 |
| (sgRNA_ | UCUCAUCG | | TCATCG | |
| 367) | | | | |
| gRNA-#20 | ACUUAGUCAACAAA | 733 | ACTTAGTCAACAAAGA | 860 |
| | GAGAGAAU | | GAGAAT | |
| gRNA-#21 | GCAGGGAUAAGCAG | 734 | GCAGGGATAAGCAGCC | 861 |
| | CCUAGCUC | | TAGCTC | |
| gRNA-#22 | GUAUGGGUUACUUA | 735 | GTATGGGTTACTTATT | 862 |
| | UUCUCUCU | | CTCTCT | |
| gRNA-#23 | CAAGAAUGAGUGGA | 736 | CAAGAATGAGTGGACT | 863 |
| | CUUCUG | | TCTG | |
| gRNA-#24 | CAAUCUGACUGCAA | 737 | CAATCTGACTGCAAAC | 864 |
| | ACCUGC | | CTGC | |
| gRNA-#25 | CACAGAAGUCCACU | 738 | CACAGAAGTCCACTCA | 865 |
| | CAUUCU | | TTCT | |
| gRNA-#26 | CAGACGAUGAGAAG | 739 | CAGACGATGAGAAGCC | 866 |
| | CCAUCC | | ATCC | |
| gRNA-#27 | CAGCAGGUUUGCAG | 740 | CAGCAGGTTTGCAGTC | 867 |
| | UCAGAU | | AGAT | |
| gRNA-#28 | CAGGAUGGCUUCUC | 741 | CAGGATGGCTTCTCAT | 868 |
| | AUCGUC | | CGTC | |
| gRNA-#29 | CAGGUUUGCAGUCA | 742 | CAGGTTTGCAGTCAGA | 869 |
| | GAUUGGC | | TTGGC | |
| gRNA-#30 | CAGUCAGAUUGGCA | 743 | CAGTCAGATTGGCAGG | 870 |
| | GGGAUA | | GATA | |
| gRNA-#31 | CCACUCAUUCUUGG | 744 | CCACTCATTCTTGGCA | 871 |
| | CAGGAU | | GGAT | |
| gRNA-#32 | CUAAGUCAAUAAUC | 745 | CTAAGTCAATAATCAG | 872 |
| | AGAAUC | | AATC | |
| gRNA-#33 | GUCAACAAAGAGAG | 746 | GTCAACAAAGAGAGAA | 873 |
| | AAUAAGUA | | TAAGTA | |
| gRNA-#34 | CUUAUCCCUGCCAA | 747 | CTTATCCCTGCCAATC | 874 |
| | UCUGAC | | TGAC | |
| gRNA-#35 | UCCCUGCCAAUCUG | 748 | TCCCTGCCAATCTGAC | 875 |
| | ACUGCAAA | | TGCAAA | |
| gRNA-#36 | UUCUCUCUUUGUUG | 749 | TTCTCTCTTTGTTGAC | 876 |
| | ACUAAGUC | | TAAGTC | |
| gRNA-#37 | UCCUGAGCUAGGCU | 750 | TCCTGAGCTAGGCTGC | 877 |
| | GCUUAUCC | | TTATCC | |
| gRNA-#38 | CUUCUGUGAUGGCU | 751 | CTTCTGTGATGGCTGC | 878 |
| | GCUCCC | | TCCC | |
| gRNA-#39 | UGUGAUGGCUGCUC | 752 | TGTGATGGCTGCTCCC | 879 |
| | CCAGCCUG | | AGCCTG | |
| gRNA-#40 | GCAGGAUGGCUUCU | 753 | GCAGGATGGCTTCTCA | 880 |
| | CAUCGUCU | | TCGTCT | |
| gRNA-#41 | UCUAGAGAGAUUAG | 754 | TCTAGAGAGATTAGAG | 881 |
| | AGCAUCGG | | CATCGG | |
| gRNA-#42 | GUUGACUAAGUCAA | 755 | GTTGACTAAGTCAATA | 882 |
| | UAAUCAGA | | ATCAGA | |
| gRNA-#43 | UAUACUCACUUCUC | 756 | TATACTCACTTCTCCT | 883 |
| | CUGAGCUA | | GAGCTA | |
| gRNA-#44 | GAAGUGAGUAUAAA | 757 | GAAGTGAGTATAAAAG | 884 |
| | AGCCCC | | CCCC | |
| gRNA-#45 | GACAAGGUUCAUAU | 758 | GACAAGGTTCATATTT | 885 |
| | UUGUAU | | GTAT | |
| gRNA-#46 | GAGUAUAAAAGCCC | 759 | GAGTATAAAAGCCCCA | 886 |
| | CAGGCU | | GGCT | |
| gRNA-#47 | GAGUGGACUUCUGU | 760 | GAGTGGACTTCTGTGA | 887 |
| | GAUGGC | | TGGC | |
| gRNA-#48 | GAUGGCUGCUCCCA | 761 | GATGGCTGCTCCCAGC | 888 |
| | GCCUGG | | CTGG | |
| gRNA-#49 | GCAGCCUAGCUCAG | 762 | GCAGCCTAGCTCAGGA | 889 |
| | GAGAAG | | GAAG | |
| gRNA-#50 | GCUGCUUAUCCCUG | 763 | GCTGCTTATCCCTGCC | 890 |
| | CCAAUC | | AATC | |
| gRNA-#51 | GGGAUAAGCAGCCU | 764 | GGGATAAGCAGCCTAG | 891 |
| | AGCUCA | | CTCA | |
| gRNA-#52 | GGUUUGCAGUCAGA | 765 | GGTTTGCAGTCAGATT | 892 |
| | UUGGCA | | GGCA | |
| gRNA-#53 | GUUACUUAUUCUCU | 766 | GTTACTTATTCTCTCT | 893 |
| | CUUUGU | | TTGT | |
| gRNA-#54 | CUUAUUCUCUCUUU | 767 | CTTATTCTCTCTTTGT | 894 |
| | GUUGACUA | | TGACTA | |
| gRNA-#55 | AUAUUUGUAUGGGU | 768 | ATATTTGTATGGGTTA | 895 |
| | UACUUAUU | | CTTATT | |
| gRNA-#56 | ACUAAGUCAAUAAU | 769 | ACTAAGTCAATAATCA | 896 |
| | CAGAAUCA | | GAATCA | |
| gRNA-#57 | GUUUGCAGUCAGAU | 770 | GTTTGCAGTCAGATTG | 897 |
| | UGGCAG | | GCAG | |
| gRNA-#58 | GCAGUCAGAUUGGC | 771 | GCAGTCAGATTGGCAG | 898 |
| | AGGGAUAA | | GGATAA | |
| gRNA-#59 | UACAAAUAUGAACC | 772 | TACAAATATGAACCTT | 899 |
| | UUGUCU | | GTCT | |
| gRNA-#60 | UACUCACUUCUCCU | 773 | TACTCACTTCTCCTGA | 900 |
| | GAGCUA | | GCTA | |
| gRNA-#61 | UAUAAAAGCCCCAG | 774 | TATAAAAGCCCCAGGC | 901 |
| | GCUGGG | | TGGG | |
| gRNA-#62 | UCACUUCUCCUGAG | 775 | TCACTTCTCCTGAGCT | 902 |
| | CUAGGC | | AGGC | |
| gRNA-#63 | UCAGAUUGGCAGGG | 776 | TCAGATTGGCAGGGAT | 903 |
| | AUAAGC | | AAGC | |
| gRNA-#64 | UCAGGAGAAGUGAG | 777 | TCAGGAGAAGTGAGTA | 904 |
| | UAUAAA | | TAAA | |
| gRNA-#65 | UCUGACUGCAAACC | 778 | TCTGACTGCAAACCTG | 905 |
| | UGCUGAU | | CTGAT | |
| gRNA-#66 | UGAGCUAGGCUGCU | 779 | TGAGCTAGGCTGCTTA | 906 |
| | UAUCCC | | TCCC | |
| gRNA-#67 | UGCCAAUCUGACUG | 780 | TGCCAATCTGACTGCA | 907 |
| | CAAACC | | AACC | |
| gRNA-#68 | UGCUCUAAUCUCUC | 781 | TGCTCTAATCTCTCTA | 908 |
| | UAGACA | | GACA | |
| gRNA-#69 | UGUGAUGGCUGCUC | 782 | TGTGATGGCTGCTCCC | 909 |
| | CCAGCC | | AGCC | |
| gRNA-#70 | UUGGCAGGGAUAAG | 783 | TTGGCAGGGATAAGCA | 910 |
| | CAGCCU | | GCCT | |
| gRNA-#71 | UUUUAUACUCACUU | 784 | TTTTATACTCACTTCT | 911 |
| | CUCCUG | | CCTG | |

TABLE 2C
Exemplary human TTR target site sequences and base editor +
guide RNA combinations.

| | | | | | Target Site/ | |
|---|---|---|---|---|---|---|
| | | | | | Protospacer + | SEQ |
| gRNA | | Cas | Editor | Editing | PAM | ID |
| Name | Editor Name | Name | Alias | Strategy | Sequence | NO |
| gRNA1594 | CBE_NGC_20nt_ | spCas9 | spCas9 | Splice | CAACTTACCCAG | 912 |
| | t_4-9_009 | | NGC | Site | AGGCAAATGGC | |
| | | | CBE | | | |
| gRNA1594 | ABE_NGC_20nt_ | spCas9 | spCas9 | Splice | CAACTTACCCAG | 912 |
| | 3-9_008 | | NGC | Site | AGGCAAATGGC | |
| | | | ABE | | | |
| gRNA1594 | ABE_NGC_20nt_ | spCas9 | spCas9 | Splice | CAACTTACCCAG | 912 |
| | 3-12_020 | | NGC IBE | Site | AGGCAAATGGC | |
| gRNA1595 | CBE_NGC_20nt_ | spCas9 | spCas9 | Stop | AATGGCTCCCAG | 913 |
| | 4-9_009 | | NGC | Codon | GTGTCATCAGC | |
| | | | CBE | | | |
| gRNA1596 | CBE_NGC_20nt_ | spCas9 | spCas9 | Stop | GGCTCCCAGGTG | 914 |
| | 4-9_009 | | NGC | Codon | TCATCAGCAGC | |
| | | | CBE | | | |
| gRNA1597 | ABE_NGC_20nt_ | spCas9 | spCas9 | Splice | CTCTCATAGGTG | 915 |
| | 3-9_008 | | NGC | Site | GTATTCACAGC | |
| | | | ABE | | | |
| gRNA1597 | ABE_NGC_20nt_ | spCas9 | spCas9 | Splice | CTCTCATAGGTG | 915 |
| | 3-12_020 | | NGC IBE | Site | GTATTCACAGC | |
| gRNA1598 | ABE_NGG_20nt_ | spCas9 | spCas9 | Splice | TATAGGAAAACC | 916 |
| | 3-12_018 | | IBE | Site | AGTGAGTCTGG | |
| gRNA1599 | ABE_NGG_20nt_ | spCas9 | spCas9 | Splice | TACTCACCTCTG | 917 |
| | 3-12_018 | | IBE | Site | CATGCTCATGG | |
| gRNA1600 | ABE_NGG_20nt_ | spCas9 | spCas9 | Splice | GCAACTTACCCA | 918 |
| | 3-12_018 | | IBE | Site | GAGGCAAATGG | |
| gRNA1601 | ABE_NGC_20nt_ | spCas9 | spCas9 | Splice | TCTGTATACTCA | 919 |
| | 3-12_020 | | NGC IBE | Site | CCTCTGCATGC | |
| gRNA1602 | ABE_NGC_20nt_ | spCas9 | spCas9 | Splice | GAAACACTCACC | 920 |
| | 3-12_020 | | NGC IBE | Site | GTAGGGCCAGC | |
| gRNA1603 | ABE_NGA_20nt_ | spCas9 | spCas9 | Splice | CTCTACACCCAG | 921 |
| | 3-12_019 | | VRQR | Site | GGCACCGGTGA | |
| | | | IBE | | | |
| gRNA1604 | ABE_NGA_20nt_ | spCas9 | spCas9 | Splice | ACACCTTATAGG | 922 |
| | 3-12_019 | | VRQR | Site | AAAACCAGTGA | |
| | | | IBE | | | |
| gRNA1605 | ABE_NGA_20nt_ | spCas9 | spCas9 | Splice | ATAGGAAAACCA | 923 |
| | 3-12_019 | | VRQR | Site | GTGAGTCTGGA | |
| | | | IBE | | | |
| gRNA1606 | ABE_NGA_20nt_ | spCas9 | spCas9 | Splice | ACTCACCTCTGC | 924 |
| | 3-12_019 | | VRQR | Site | ATGCTCATGGA | |
| | | | IBE | | | |
| gRNA1607 | ABE_NGA_20nt_ | spCas9 | spCas9 | Splice | CTCACCGTAGGG | 925 |
| | 3-12_019 | | VRQR | Site | CCAGCCTCAGA | |
| | | | IBE | | | |
| gRNA1746 | ABE_NGA_20nt_ | spCas9 | spCas9 | TTR | AACCTGCTGATT | 926 |
| | 3-9_005 | | VRQR | Promoter | CTGATTATTGA | |
| | | | ABE | | | |
| gRNA1746 | CBE_NGA_20nt_ | spCas9 | spCas9 | TTR | AACCTGCTGATT | 926 |
| | 4-9_006 | | VRQR | Promoter | CTGATTATTGA | |
| | | | CBE | | | |
| gRNA1746 | ABE_NGA_20nt_ | spCas9 | spCas9 | TTR | AACCTGCTGATT | 926 |
| | 3-12_019 | | VRQR | Promoter | CTGATTATTGA | |
| | | | IBE | | | |
| gRNA1747 | ABE_NNNRRT_ | saCas9 | saCas9 | TTR | AAGAGAGAATAA | 927 |
| | 21nt_5-14_014 | | KKH | Promoter | GTAACCCATACA | |
| | | | ABE | | AAT | |
| gRNA1747 | CBE_NNNRRT_ | saCas9 | saCas9 | TTR | AAGAGAGAATAA | 927 |
| | 21nt_3-12_015 | | KKH | Promoter | GTAACCCATACA | |
| | | | CBE | | AAT | |
| gRNA1748 | ABE_NNGRRT_ | saCas9 | saCas9 | TTR | AAGCAGCCTAGC | 928 |
| | 21nt_5-14_011 | | ABE | Promoter | TCAGGAGAAGTG | |
| | | | | | AGT | |
| gRNA1748 | CBE_NNGRRT_ | saCas9 | saCas9 | TTR | AAGCAGCCTAGC | 928 |
| | 21nt_3-12_012 | | CBE | Promoter | TCAGGAGAAGTG | |
| | | | | | AGT | |
| gRNA1749 | ABE_NGA_20nt_ | spCas9 | spCas9 | TTR | AAGTCCACTCAT | 929 |
| | 3-9_005 | | VRQR | Promoter | TCTTGGCAGGA | |
| | | | ABE | | | |
| gRNA1749 | CBE_NGA_20nt_ | spCas9 | spCas9 | TTR | AAGTCCACTCAT | 929 |
| | 4-9_006 | | VRQR | Promoter | TCTTGGCAGGA | |
| | | | CBE | | | |
| gRNA1749 | ABE_NGA_20nt_ | spCas9 | spCas9 | TTR | AAGTCCACTCAT | 929 |
| | 3-12_019 | | VRQR | Promoter | TCTTGGCAGGA | |
| | | | IBE | | | |
| gRNA1750 | ABE_NNGRRT_ | saCas9 | saCas9 | TTR | ACGATGAGAAGC | 930 |
| | 21nt_5-14_011 | | ABE | Promoter | CATCCTGCCAAG | |
| | | | | | AAT | |
| gRNA1750 | CBE_NNGRRT | saCas9 | saCas9 | TTR | ACGATGAGAAGC | 930 |
| | 21nt_3-12_012 | | CBE | Promoter | CATCCTGCCAAG | |
| | | | | | AAT | |
| gRNA1751 | ABE_NGG_20nt_ | spCas9 | spCas9 | TTR | AGACAAGGTTCA | 931 |
| | 3-9_002 | | ABE | Promoter | TATTTGTATGG | |
| gRNA1751 | CBE_NGG_20nt_ | spCas9 | spCas9 | TTR | AGACAAGGTTCA | 931 |
| | 4-9_003 | | CBE | Promoter | TATTTGTATGG | |
| gRNA1751 | ABE_NGG_20nt_ | spCas9 | spCas9 | TTR | AGACAAGGTTCA | 931 |
| | 3-12_018 | | IBE | Promoter | TATTTGTATGG | |
| gRNA1752 | ABE_NGA_20nt_ | spCas9 | spCas9 | TTR | AGGCTGGGAGCA | 932 |
| | 3-9_005 | | VRQR | Promoter | GCCATCACAGA | |
| | | | ABE | | | |
| gRNA1752 | CBE_NGA_20nt_ | spCas9 | spCas9 | TTR | AGGCTGGGAGCA | 932 |
| | 4-9_006 | | VRQR | Promoter | GCCATCACAGA | |
| | | | CBE | | | |
| gRNA1752 | ABE_NGA_20nt_ | spCas9 | spCas9 | TTR | AGGCTGGGAGCA | 932 |
| | 3-12_019 | | VRQR | Promoter | GCCATCACAGA | |
| | | | IBE | | | |
| gRNA1753 | ABE_NGA_20nt_ | spCas9 | spCas9 | TTR | ATAAGTAACCCA | 933 |
| | 3-9_005 | | VRQR | Promoter | TACAAATATGA | |
| | | | ABE | | | |
| gRNA1753 | CBE_NGA_20nt_ | spCas9 | spCas9 | TTR | ATAAGTAACCCA | 933 |
| | 4-9_006 | | VRQR | Promoter | TACAAATATGA | |
| | | | CBE | | | |
| gRNA1753 | ABE_NGA_20nt_ | spCas9 | spCas9 | TTR | ATAAGTAACCCA | 933 |
| | 3-12_019 | | VRQR | Promoter | TACAAATATGA | |
| | | | IBE | | | |
| gRNA1754 | ABE_NGG_20nt_ | spCas9 | spCas9 | TTR | ATACTCACTTCT | 934 |
| | 3-9_002 | | ABE | Promoter | CCTGAGCTAGG | |
| gRNA1754 | CBE_NGG_20nt_ | spCas9 | spCas9 | TTR | ATACTCACTTCT | 934 |
| | 4-9_003 | | CBE | Promoter | CCTGAGCTAGG | |
| gRNA1754 | ABE_NGG_20nt_ | spCas9 | spCas9 | TTR | ATACTCACTTCT | 934 |
| | 3-12_018 | | IBE | Promoter | CCTGAGCTAGG | |
| gRNA1755 | ABE_NGA_20nt_ | spCas9 | spCas9 | TTR | ATTATTGACTTA | 935 |
| | 3-9_005 | | VRQR | Promoter | GTCAACAAAGA | |
| | | | ABE | | | |
| gRNA1755 | CBE_NGA_20nt_ | spCas9 | spCas9 | TTR | ATTATTGACTTA | 935 |
| | 4-9_006 | | VRQR | Promoter | GTCAACAAAGA | |
| | | | CBE | | | |
| gRNA1755 | ABE_NGA_20nt_ | spCas9 | spCas9 | TTR | ATTATTGACTTA | 935 |
| | 3-12_019 | | VRQR | Promoter | GTCAACAAAGA | |
| | | | IBE | | | |
| gRNA1756 | ABE_NGA_20nt_ | spCas9 | spCas9 | TTR | CAAATATGAACC | 936 |
| | 3-9_005 | | VRQR | Promoter | TTGTCTAGAGA | |
| | | | ABE | | | |
| gRNA1756 | CBE_NGA_20nt_ | spCas9 | spCas9 | TTR | CAAATATGAACC | 936 |
| | 4-9_006 | | VRQR | Promoter | TTGTCTAGAGA | |
| | | | CBE | | | |
| gRNA1756 | ABE_NGA_20nt_ | spCas9 | spCas9 | TTR | CAAATATGAACC | 936 |
| | 3-12_019 | | VRQR | Promoter | TTGTCTAGAGA | |
| | | | IBE | | | |
| gRNA1757 | ABE_NNGRRT_ | saCas9 | saCas9 | TTR | CAGAAGTCCACT | 937 |
| | 21nt_5-14_011 | | ABE | Promoter | CATTCTTGGCAG | |
| | | | | | GAT | |
| gRNA1757 | CBE_NNGRRT_ | saCas9 | saCas9 | TTR | CAGAAGTCCACT | 937 |
| | 21nt_3-12_012 | | CBE | Promoter | CATTCTTGGCAG | |
| | | | | | GAT | |
| gRNA1758 | ABE_NNNRRT_ | saCas9 | saCas9 | TTR | CAGGCTGGGAGC | 938 |
| | 21nt_5-14_014 | | KKH | Promoter | AGCCATCACAGA | |
| | | | ABE | | AGT | |
| gRNA1758 | CBE_NNNRRT_ | saCas9 | saCas9 | TTR | CAGGCTGGGAGC | 938 |
| | 21nt_3-12_015 | | KKH | Promoter | AGCCATCACAGA | |
| | | | CBE | | AGT | |
| gRNA1759 | ABE_NGA_20nt_ | spCas9 | spCas9 | TTR | CCATCCTGCCAA | 939 |
| | 3-9_005 | | VRQR | Promoter | GAATGAGTGGA | |
| | | | ABE | | | |
| gRNA1759 | CBE_NGA_20nt_ | spCas9 | spCas9 | TTR | CCATCCTGCCAA | 939 |
| | 4-9_006 | | VRQR | Promoter | GAATGAGTGGA | |
| | | | CBE | | | |
| gRNA1759 | ABE_NGA_20nt_ | spCas9 | spCas9 | TTR | CCATCCTGCCAA | 939 |
| | 3-12_019 | | VRQR | Promoter | GAATGAGTGGA | |
| | | | IBE | | | |
| gRNA1760 | ABE_NNNRRT_ | saCas9 | saCas9 | TTR | CCTGCTGATTCT | 940 |
| | 21nt_5-14_014 | | KKH | Promoter | GATTATTGACTT | |
| | | | ABE | | AGT | |
| gRNA1760 | CBE_NNNRRT_ | saCas9 | saCas9 | TTR | CCTGCTGATTCT | 940 |
| | 21nt_3-12_015 | | KKH | Promoter | GATTATTGACTT | |
| | | | CBE | | AGT | |
| gRNA1761 | ABE_NNNRRT_ | saCas9 | saCas9 | TTR | CGATGCTCTAAT | 941 |
| | 21nt_5-14_014 | | KKH | Promoter | CTCTCTAGACAA | |
| | | | ABE | | GGT | |
| gRNA1761 | CBE_NNNRRT_ | saCas9 | saCas9 | TTR | CGATGCTCTAAT | 941 |
| | 21nt_3-12_015 | | KKH | Promoter | CTCTCTAGACAA | |
| | | | CBE | | GGT | |
| gRNA1762 | ABE_NNNRRT_ | saCas9 | saCas9 | TTR | CTAAGTCAATAA | 942 |
| | 21nt_5-14_014 | | KKH | Promoter | TCAGAATCAGCA | |
| | | | ABE | | GGT | |
| gRNA1762 | CBE_NNNRRT_ | saCas9 | saCas9 | TTR | CTAAGTCAATAA | 942 |
| | 21nt_3-12_015 | | KKH | Promoter | TCAGAATCAGCA | |
| | | | CBE | | GGT | |
| gRNA1763 | ABE_NNGRRT_ | saCas9 | saCas9 | TTR | CTAGACAAGGTT | 943 |
| | 21nt_5-14_011 | | ABE | Promoter | CATATTTGTATG | |
| | | | | | GGT | |
| gRNA1763 | CBE_NNGRRT_ | saCas9 | saCas9 | TTR | CTAGACAAGGTT | 943 |
| | 21nt_3-12_012 | | CBE | Promoter | CATATTTGTATG | |
| | | | | | GGT | |
| gRNA1764 | ABE_NGA_20nt_ | spCas9 | spCas9 | TTR | GAACCTTGTCTA | 944 |
| | 3-9_005 | | VRQR | Promoter | GAGAGATTAGA | |
| | | | ABE | | | |
| gRNA1764 | CBE_NGA_20nt_ | spCas9 | spCas9 | TTR | GAACCTTGTCTA | 944 |
| | 4-9_006 | | VRQR | Promoter | GAGAGATTAGA | |
| | | | CBE | | | |
| gRNA1764 | ABE_NGA_20nt_ | spCas9 | spCas9 | TTR | GAACCTTGTCTA | 944 |
| | 3-12_019 | | VRQR | Promoter | GAGAGATTAGA | |
| | | | IBE | | | |
| gRNA1765 | ABE_NGG_20nt_ | spCas9 | spCas9 | TTR | GAAGTCCACTCA | 945 |
| | 3-9_002 | | ABE | Promoter | TTCTTGGCAGG | |
| gRNA1765 | CBE_NGG_20nt_ | spCas9 | spCas9 | TTR | GAAGTCCACTCA | 945 |
| | 4-9_003 | | CBE | Promoter | TTCTTGGCAGG | |
| gRNA1765 | ABE_NGG_20nt_ | spCas9 | spCas9 | TTR | GAAGTCCACTCA | 945 |
| | 3-12_018 | | IBE | Promoter | TTCTTGGCAGG | |
| gRNA1766 | ABE_NGA_20nt_ | spCas9 | spCas9 | TTR | GAATCAGCAGGT | 946 |
| | 3-9_005 | | VRQR | Promoter | TTGCAGTCAGA | |
| | | | ABE | | | |
| gRNA1766 | CBE_NGA_20nt_ | spCas9 | spCas9 | TTR | GAATCAGCAGGT | 946 |
| | 4-9_006 | | VRQR | Promoter | TTGCAGTCAGA | |
| | | | CBE | | | |
| gRNA1766 | ABE_NGA_20nt_ | spCas9 | spCas9 | TTR | GAATCAGCAGGT | 946 |
| | 3-12_019 | | VRQR | Promoter | TTGCAGTCAGA | |
| | | | IBE | | | |
| gRNA1767 | ABE_NGG_20nt_ | spCas9 | spCas9 | TTR | GAATGAGTGGAC | 947 |
| | 3-9_002 | | ABE | Promoter | TTCTGTGATGG | |
| gRNA1767 | CBE_NGG_20nt_ | spCas9 | spCas9 | TTR | GAATGAGTGGAC | 947 |
| | 4-9_003 | | CBE | Promoter | TTCTGTGATGG | |
| gRNA1767 | ABE_NGG_20nt_ | spCas9 | spCas9 | TTR | GAATGAGTGGAC | 947 |
| | 3-12_018 | | IBE | Promoter | TTCTGTGATGG | |
| gRNA1768 | ABE_NGA_20nt_ | spCas9 | spCas9 | TTR | GACTGCAAACCT | 948 |
| | 3-9_005 | | VRQR | Promoter | GCTGATTCTGA | |
| | | | ABE | | | |
| gRNA1768 | CBE_NGA_20nt_ | spCas9 | spCas9 | TTR | GACTGCAAACCT | 948 |
| | 4-9_006 | | VRQR | Promoter | GCTGATTCTGA | |
| | | | CBE | | | |
| gRNA1768 | ABE_NGA_20nt_ | spCas9 | spCas9 | TTR | GACTGCAAACCT | 948 |
| | 3-12_019 | | VRQR | Promoter | GCTGATTCTGA | |
| | | | IBE | | | |
| gRNA1769 | ABE_NNNRRT_ | saCas9 | saCas9 | TTR | GACTTAGTCAAC | 949 |
| | 21nt_5-14_014 | | KKH | Promoter | AAAGAGAGAATA | |
| | | | ABE | | AGT | |
| gRNA1769 | CBE_NNNRRT_ | saCas9 | saCas9 | TTR | GACTTAGTCAAC | 949 |
| | 21nt_3-12_015 | | KKH | Promoter | AAAGAGAGAATA | |
| | | | CBE | | AGT | |
| gRNA1770 | ABE_NGA_20nt_ | spCas9 | spCas9 | TTR | GATAAGCAGCCT | 950 |
| | 3-9_005 | | VRQR | Promoter | AGCTCAGGAGA | |
| | | | ABE | | | |
| gRNA1770 | CBE_NGA_20nt_ | spCas9 | spCas9 | TTR | GATAAGCAGCCT | 950 |
| | 4-9_006 | | VRQR | Promoter | AGCTCAGGAGA | |
| | | | CBE | | | |
| gRNA1770 | ABE_NGA_20nt_ | spCas9 | spCas9 | TTR | GATAAGCAGCCT | 950 |
| | 3-12_019 | | VRQR | Promoter | AGCTCAGGAGA | |
| | | | IBE | | | |
| gRNA1771 | ABE_NGA_20nt_ | spCas9 | spCas9 | TTR | GATGAGAAGCCA | 951 |
| | 3-9_005 | | VRQR | Promoter | TCCTGCCAAGA | |
| | | | ABE | | | |
| gRNA1771 | CBE_NGA_20nt_ | spCas9 | spCas9 | TTR | GATGAGAAGCCA | 951 |
| | 4-9_006 | | VRQR | Promoter | TCCTGCCAAGA | |
| | | | CBE | | | |
| gRNA1771 | ABE_NGA_20nt_ | spCas9 | spCas9 | TTR | GATGAGAAGCCA | 951 |
| | 3-12_019 | | VRQR | Promoter | TCCTGCCAAGA | |
| | | | IBE | | | |
| gRNA1772 | ABE_NGG_20nt_ | spCas9 | spCas9 | TTR | GCCATCCTGCCA | 952 |
| | 3-9_002 | | ABE | Promoter | AGAATGAGTGG | |
| gRNA1772 | CBE_NGG_20nt_ | spCas9 | spCas9 | TTR | GCCATCCTGCCA | 952 |
| | 4-9_003 | | CBE | Promoter | AGAATGAGTGG | |
| gRNA1772 | ABE_NGG_20nt_ | spCas9 | spCas9 | TTR | GCCATCCTGCCA | 952 |
| | 3-12_018 | | IBE | Promoter | AGAATGAGTGG | |
| gRNA1773 | ABE_NGA_20nt_ | spCas9 | spCas9 | TTR | GCTTTTATACTC | 953 |
| | 3-9_005 | | VRQR | Promoter | ACTTCTCCTGA | |
| | | | ABE | | | |
| gRNA1773 | CBE_NGA_20nt_ | spCas9 | spCas9 | TTR | GCTTTTATACTC | 953 |
| | 4-9_006 | | VRQR | Promoter | ACTTCTCCTGA | |
| | | | CBE | | | |
| gRNA1773 | ABE_NGA_20nt_ | spCas9 | spCas9 | TTR | GCTTTTATACTC | 953 |
| | 3-12_019 | | VRQR | Promoter | ACTTCTCCTGA | |
| | | | IBE | | | |
| gRNA1774 | ABE_NNNRRT_ | saCas9 | saCas9 | TTR | GGATAAGCAGCC | 954 |
| | 21nt_5-14_014 | | KKH | Promoter | TAGCTCAGGAGA | |
| | _ | | ABE | | AGT | |
| gRNA1774 | CBE_NNNRRT_ | saCas9 | saCas9 | TTR | GGATAAGCAGCC | 954 |
| | 21nt_3-12_015 | | KKH | Promoter | TAGCTCAGGAGA | |
| | | | CBE | | AGT | |
| gRNA1775 | ABE_NGG_20nt_ | spCas9 | spCas9 | TTR | GTCTAGAGAGAT | 955 |
| | 3-9_002 | | ABE | Promoter | TAGAGCATCGG | |
| gRNA1775 | CBE_NGG_20nt_ | spCas9 | spCas9 | TTR | GTCTAGAGAGAT | 955 |
| | 4-9_003 | | CBE | Promoter | TAGAGCATCGG | |
| gRNA1775 | ABE_NGG_20nt_ | spCas9 | spCas9 | TTR | GTCTAGAGAGAT | 955 |
| | 3-12_018 | | IBE | Promoter | TAGAGCATCGG | |
| gRNA1776 | ABE_NGG_20nt_ | spCas9 | spCas9 | TTR | GTGATGGCTGCT | 956 |
| | 3-9_002 | | ABE | Promoter | CCCAGCCTGGG | |
| gRNA1776 | CBE_NGG_20nt_ | spCas9 | spCas9 | TTR | GTGATGGCTGCT | 956 |
| | 4-9_003 | | CBE | Promoter | CCCAGCCTGGG | |
| gRNA1776 | ABE_NGG_20nt_ | spCas9 | spCas9 | TTR | GTGATGGCTGCT | 956 |
| | 3-12_018 | | IBE | Promoter | CCCAGCCTGGG | |
| gRNA1777 | ABE_NNNRRT_ | saCas9 | saCas9 | TTR | TACTTATTCTCT | 957 |
| | 21nt_5-14_014 | | KKH | Promoter | CTTTGTTGACTA | |
| | | | ABE | | AGT | |
| gRNA1777 | CBE_NNNRRT_ | saCas9 | saCas9 | TTR | TACTTATTCTCT | 957 |
| | 21nt_3-12_015 | | KKH | Promoter | CTTTGTTGACTA | |
| | | | CBE | | AGT | |
| gRNA1778 | ABE_NNNRRT_ | saCas9 | saCas9 | TTR | TATTCTCTCTTT | 958 |
| | 21nt_5-14_014 | | KKH | Promoter | GTTGACTAAGTC | |
| | | | ABE | | AAT | |
| gRNA1778 | CBE_NNNRRT_ | saCas9 | saCas9 | TTR | TATTCTCTCTTT | 958 |
| | 21nt_3-12_015 | | KKH | Promoter | GTTGACTAAGTC | |
| | | | CBE | | AAT | |
| gRNA1779 | ABE_NGA_20nt_ | spCas9 | spCas9 | TTR | TATTGACTTAGT | 959 |
| | 3-9_005 | | VRQR | Promoter | CAACAAAGAGA | |
| | | | ABE | | | |
| gRNA1779 | CBE_NGA_20nt_ | spCas9 | spCas9 | TTR | TATTGACTTAGT | 959 |
| | 4-9_006 | | VRQR | Promoter | CAACAAAGAGA | |
| | | | CBE | | | |
| gRNA1779 | ABE_NGA_20nt_ | spCas9 | spCas9 | TTR | TATTGACTTAGT | 959 |
| | 3-12_019 | | VRQR | Promoter | CAACAAAGAGA | |
| | | | IBE | | | |
| gRNA1780 | ABE_NNGRRT_ | saCas9 | saCas9 | TTR | TATTGACTTAGT | 960 |
| | 21nt_5-14_011 | | ABE | Promoter | CAACAAAGAGAG | |
| | | | | | AAT | |
| gRNA1780 | CBE_NNGRRT_ | saCas9 | saCas9 | TTR | TATTGACTTAGT | 960 |
| | 21nt_3-12_012 | | CBE | Promoter | CAACAAAGAGAG | |
| | | | | | AAT | |
| gRNA1781 | ABE_NNNRRT_ | saCas9 | saCas9 | TTR | TCAGAATCAGCA | 961 |
| | 21nt_5-14_014 | | KKH | Promoter | GGTTTGCAGTCA | |
| | | | ABE | | GAT | |
| gRNA1781 | CBE_NNNRRT | saCas9 | saCas9 | TTR | TCAGAATCAGCA | 961 |
| | 21nt_3-12_015 | | KKH | Promoter | GGTTTGCAGTCA | |
| | | | CBE | | GAT | |
| gRNA1782 | ABE_NGG_20nt_ | spCas9 | spCas9 | TTR | TCCACTCATTCT | 962 |
| | 3-9_002 | | ABE | Promoter | TGGCAGGATGG | |
| gRNA1782 | CBE_NGG_20nt_ | spCas9 | spCas9 | TTR | TCCACTCATTCT | 962 |
| | 4-9_003 | | CBE | Promoter | TGGCAGGATGG | |
| gRNA1782 | ABE_NGG_20nt_ | spCas9 | spCas9 | TTR | TCCACTCATTCT | 962 |
| | 3-12_018 | | IBE | Promoter | TGGCAGGATGG | |
| gRNA1783 | ABE_NNNRRT_ | saCas9 | saCas9 | TTR | TCTCTCTTTGTT | 963 |
| | 21nt_5-14_014 | | KKH | Promoter | GACTAAGTCAAT | |
| | | | ABE | | AAT | |
| gRNA1783 | CBE_NNNRRT_ | saCas9 | saCas9 | TTR | TCTCTCTTTGTT | 963 |
| | 21nt_3-12_015 | | KKH | Promoter | GACTAAGTCAAT | |
| | | | CBE | | AAT | |
| gRNA1784 | ABE_NNGRRT_ | saCas9 | saCas9 | TTR | TGAGAAGCCATC | 964 |
| | 21nt_5-14_011 | | ABE | Promoter | CTGCCAAGAATG | |
| | | | | | AGT | |
| gRNA1784 | CBE_NNGRRT_ | saCas9 | saCas9 | TTR | TGAGAAGCCATC | 964 |
| | 21nt_3-12_012 | | CBE | Promoter | CTGCCAAGAATG | |
| | | | | | AGT | |
| gRNA1785 | ABE_NNNRRT_ | saCas9 | saCas9 | TTR | TGAGCTAGGCTG | 965 |
| | 21nt_5-14_014 | | KKH | Promoter | CTTATCCCTGCC | |
| | | | ABE | | AAT | |
| gRNA1785 | CBE_NNNRRT_ | saCas9 | saCas9 | TTR | TGAGCTAGGCTG | 965 |
| | 21nt_3-12_015 | | KKH | Promoter | CTTATCCCTGCC | |
| | | | CBE | | AAT | |
| gRNA1786 | ABE_NGG_20nt_ | spCas9 | spCas9 | TTR | TGAGTATAAAAG | 966 |
| | 3-9_002 | | ABE | Promoter | CCCCAGGCTGG | |
| gRNA1786 | CBE_NGG_20nt_ | spCas9 | spCas9 | TTR | TGAGTATAAAAG | 966 |
| | 4-9_003 | | CBE | Promoter | CCCCAGGCTGG | |
| gRNA1786 | ABE_NGG_20nt_ | spCas9 | spCas9 | TTR | TGAGTATAAAAG | 966 |
| | 3-12_018 | | IBE | Promoter | CCCCAGGCTGG | |
| gRNA1787 | ABE_NGG_20nt_ | spCas9 | spCas9 | TTR | TGATGGCTGCTC | 967 |
| | 3-9_002 | | ABE | Promoter | CCAGCCTGGGG | |
| gRNA1787 | CBE_NGG_20nt_ | spCas9 | spCas9 | TTR | TGATGGCTGCTC | 967 |
| | 4-9_003 | | CBE | Promoter | CCAGCCTGGGG | |
| gRNA1787 | ABE_NGG_20nt_ | spCas9 | spCas9 | TTR | TGATGGCTGCTC | 967 |
| | 3-12_018 | | IBE | Promoter | CCAGCCTGGGG | |
| gRNA1788 | ABE_NNNRRT_ | saCas9 | saCas9 | TTR | TGCCAAGAATGA | 968 |
| | 21nt_5-14_014 | | KKH | Promoter | GTGGACTTCTGT | |
| | | | ABE | | GAT | |
| gRNA1788 | CBE_NNNRRT_ | saCas9 | saCas9 | TTR | TGCCAAGAATGA | 968 |
| | 21nt_3-12_015 | | KKH | Promoter | GTGGACTTCTGT | |
| | | | CBE | | GAT | |
| gRNA1789 | ABE_NNNRRT_ | saCas9 | saCas9 | TTR | TGCCAATCTGAC | 969 |
| | 21nt_5-14_014 | | KKH | Promoter | TGCAAACCTGCT | |
| | | | ABE | TTR | GAT | |
| gRNA1789 | CBE_NNNRRT_ | saCas9 | saCas9 | Promoter | TGCCAATCTGAC | 969 |
| | 21nt_3-12_015 | | KKH | | TGCAAACCTGCT | |
| | | | CBE | | GAT | |
| gRNA1790 | ABE_NGA_20nt_ | spCas9 | spCas9 | TTR | TGTTGACTAAGT | 970 |
| | 3-9_005 | | VRQR | Promoter | CAATAATCAGA | |
| | | | ABE | | | |
| gRNA1790 | CBE_NGA_20nt_ | spCas9 | spCas9 | TTR | TGTTGACTAAGT | 970 |
| | 4-9_006 | | VRQR | Promoter | CAATAATCAGA | |
| | | | CBE | | | |
| gRNA1790 | ABE_NGA_20nt_ | spCas9 | spCas9 | TTR | TGTTGACTAAGT | 970 |
| | 3-12_019 | | VRQR | Promoter | CAATAATCAGA | |
| | | | IBE | | | |
| gRNA1791 | ABE_NGA_20nt_ | spCas9 | spCas9 | TTR | TTGACTTAGTCA | 971 |
| | 3-9_005 | | VRQR | Promoter | ACAAAGAGAGA | |
| | | | ABE | | | |
| gRNA1791 | CBE_NGA_20nt_ | spCas9 | spCas9 | TTR | TTGACTTAGTCA | 971 |
| | 4-9_006 | | VRQR | Promoter | ACAAAGAGAGA | |
| | | | CBE | | | |
| gRNA1791 | ABE_NGA_20nt_ | spCas9 | spCas9 | TTR | TTGACTTAGTCA | 971 |
| | 3-12_019 | | VRQR | Promoter | ACAAAGAGAGA | |
| | | | IBE | | | |
| gRNA1792 | ABE_NNGRRT_ | saCas9 | saCas9 | TTR | TTTGTTGACTAA | 972 |
| | 21nt_5-14_011 | | ABE | Promoter | GTCAATAATCAG | |
| | | | | | AAT | |
| gRNA1792 | CBE_NNGRRT_ | saCas9 | saCas9 | TTR | TTTGTTGACTAA | 972 |
| | 21nt_3-12_012 | | CBE | Promoter | GTCAATAATCAG | |
| | | | | | AAT | |
| gRNA-#1 | ABE_NGC_20nt_ | spCas9 | spCas9 | TTR | AAAAGCCCCAGG | 973 |
| | 3-9_008 | | NGC | Promoter | CTGGGAGCAGC | |
| | | | ABE | | | |
| gRNA-#1 | CBE_NGC_20nt_ | spCas9 | spCas9 | TTR | AAAAGCCCCAGG | 973 |
| | 4-9_009 | | NGC | Promoter | CTGGGAGCAGC | |
| | | | CBE | | | |
| gRNA-#1 | ABE_NGC_20nt_ | spCas9 | spCas9 | TTR | AAAAGCCCCAGG | 973 |
| | 3-12_020 | | NGC IBE | Promoter | CTGGGAGCAGC | |
| gRNA-#2 | ABE_NGC_20nt_ | | spCas9 | TTR | AAGTGAGTATAA | 974 |
| | 3-9_008 | | NGC | | AAGCCCCAGGC | |
| gRNA-#2 | CBE_NGC_20nt_ | spCas9 | ABE | Promoter | AAGTGAGTATAA | 974 |
| | 4-9_009 | spCas9 | spCas9 | TTR | AAGCCCCAGGC | |
| | | | NGC | | | |
| gRNA-#2 | ABE_NGC_20nt_ | | CBE | Promoter | AAGTGAGTATAA | 974 |
| | 3-12_020 | spCas9 | spCas9 | TTR | AAGCCCCAGGC | |
| gRNA-#3 | ABE_NNNRRT_ | saCas9 | NGC IBE | Promoter | AATAATCAGAAT | 975 |
| | 21nt_5-14_014 | | saCas9 | TTR | CAGCAGGTTTGC | |
| | | | KKH | Promoter | AGT | |
| | | | ABE | | | |
| gRNA-#3 | CBE_NNNRRT_ | saCas9 | saCas9 | TTR | AATAATCAGAAT | 975 |
| | 21nt_3-12_015 | | KKH | Promoter | CAGCAGGTTTGC | |
| | | | CBE | | AGT | |
| gRNA-#4 | CBE_NGA_20nt_ | spCas9 | spCas9 | TTR | AATATGAACCTT | 976 |
| | 4-9_006 | | VRQR | Promoter | GTCTAGAGAGA | |
| | | | CBE | | | |
| gRNA-#4 | ABE_NGA_20nt_ | spCas9 | spCas9 | TTR | AATATGAACCTT | 976 |
| | 3-9_005 | | VRQR | Promoter | GTCTAGAGAGA | |
| | | | ABE | | | |
| gRNA-#4 | ABE_NGA_20nt_ | spCas9 | spCas9 | TTR | AATATGAACCTT | 976 |
| | 3-12_019 | | VRQR | Promoter | GTCTAGAGAGA | |
| | | | IBE | | | |
| gRNA-#5 | ABE_NGC_20nt_ | spCas9 | spCas9 | TTR | AATGAGTGGACT | 977 |
| | 3-9_008 | | NGC | Promoter | TCTGTGATGGC | |
| | | | ABE | | | |
| gRNA-#5 | CBE_NGC_20nt_ | spCas9 | spCas9 | TTR | AATGAGTGGACT | 977 |
| | 4-9_009 | | NGC | Promoter | TCTGTGATGGC | |
| | | | CBE | | | |
| gRNA-#5 | ABE_NGC_20nt_ | spCas9 | spCas9 | TTR | AATGAGTGGACT | 977 |
| | 3-12_020 | | NGC IBE | Promoter | TCTGTGATGGC | |
| gRNA-#6 | ABE_NNNRRT | saCas9 | saCas9 | TTR | ACAAATATGAAC | 978 |
| | 21nt_5-14_014 | | KKH | Promoter | CTTGTCTAGAGA | |
| | | | ABE | | GAT | |
| gRNA-#6 | CBE_NNNRRT | saCas9 | saCas9 | TTR | ACAAATATGAAC | 978 |
| | 21nt_3-12_015 | | KKH | Promoter | CTTGTCTAGAGA | |
| | | | CBE | | GAT | |
| gRNA-#7 | ABE_NGC_20nt_ | spCas9 | spCas9 | TTR | ACAGAAGTCCAC | 979 |
| | 3-9_008 | | NGC | Promoter | TCATTCTTGGC | |
| | | | ABE | | | |
| gRNA-#7 | CBE_NGC_20nt_ | spCas9 | spCas9 | TTR | ACAGAAGTCCAC | 979 |
| | 4-9_009 | | NGC | Promoter | TCATTCTTGGC | |
| | | | CBE | | | |
| gRNA-#7 | ABE_NGC_20nt_ | spCas9 | spCas9 | TTR | ACAGAAGTCCAC | 979 |
| | 3-12_020 | | NGC IBE | Promoter | TCATTCTTGGC | |
| gRNA-#8 | ABE_NGC_20nt_ | spCas9 | spCas9 | TTR | ACCTTGTCTAGA | 980 |
| | 3-9_008 | | NGC | Promoter | GAGATTAGAGC | |
| | | | ABE | | | |
| gRNA-#8 | CBE_NGC_20nt_ | spCas9 | spCas9 | TTR | ACCTTGTCTAGA | 980 |
| | 4-9_009 | | NGC | Promoter | GAGATTAGAGC | |
| | | | CBE | | | |
| gRNA-#8 | ABE_NGC_20nt_ | spCas9 | spCas9 | TTR | ACCTTGTCTAGA | 980 |
| | 3-12_020 | | NGC IBE | Promoter | GAGATTAGAGC | |
| gRNA-#9 | CBE_NGA_20nt_ | spCas9 | spCas9 | TTR | AGAAGCCATCCT | 981 |
| | 4-9_006 | | VRQR | Promoter | GCCAAGAATGA | |
| | | | CBE | | | |
| gRNA-#9 | ABE_NGA_20nt_ | spCas9 | spCas9 | TTR | AGAAGCCATCCT | 981 |
| | 3-9_005 | | VRQR | Promoter | GCCAAGAATGA | |
| | | | ABE | | | |
| gRNA-#9 | ABE_NGA_20nt_ | spCas9 | spCas9 | TTR | AGAAGCCATCCT | 981 |
| | 3-12_019 | | VRQR | Promoter | GCCAAGAATGA | |
| | | | IBE | | | |
| gRNA-#10 | ABE_NGC_20nt_ | spCas9 | spCas9 | TTR | AGCAGGTTTGCA | 982 |
| | 3-9_008 | | NGC | Promoter | GTCAGATTGGC | |
| | | | ABE | | | |
| gRNA-#10 | CBE_NGC_20nt_ | spCas9 | spCas9 | TTR | AGCAGGTTTGCA | 982 |
| | 4-9_009 | | NGC | Promoter | GTCAGATTGGC | |
| | | | CBE | | | |
| gRNA-#10 | ABE_NGC_20nt_ | spCas9 | spCas9 | TTR | AGCAGGTTTGCA | 982 |
| | 3-12_020 | | NGC IBE | Promoter | GTCAGATTGGC | |
| gRNA-#11 | ABE_NGG_20nt_ | spCas9 | spCas9 | TTR | AGGGATAAGCAG | 983 |
| | 3-9_002 | | ABE | Promoter | CCTAGCTCAGG | |
| gRNA-#11 | CBE_NGG_20nt_ | spCas9 | spCas9 | TTR | AGGGATAAGCAG | 983 |
| | 4-9_003 | | CBE | Promoter | CCTAGCTCAGG | |
| gRNA-#11 | ABE_NGG_20nt_ | spCas9 | spCas9 | TTR | AGGGATAAGCAG | 983 |
| | 3-12_018 | | IBE | Promoter | CCTAGCTCAGG | |
| gRNA-#12 | ABE_NGG_20nt_ | spCas9 | spCas9 | TTR | AGGTTTGCAGTC | 984 |
| | 3-9_002 | | ABE | Promoter | AGATTGGCAGG | |
| gRNA-#12 | CBE_NGG_20nt_ | spCas9 | spCas9 | TTR | AGGTTTGCAGTC | 984 |
| | 4-9_003 | | CBE | Promoter | AGATTGGCAGG | |
| gRNA-#12 | ABE_NGG_20nt_ | spCas9 | spCas9 | TTR | AGGTTTGCAGTC | 984 |
| | 3-12_018 | | IBE | Promoter | AGATTGGCAGG | |
| gRNA-#13 | CBE_NGA_20nt_ | spCas9 | spCas9 | TTR | AGTATAAAAGCC | 985 |
| | 4-9_006 | | VRQR | Promoter | CCAGGCTGGGA | |
| | | | CBE | | | |
| gRNA-#13 | ABE_NGA_20nt_ | spCas9 | spCas9 | TTR | AGTATAAAAGCC | 985 |
| | 3-9_005 | | VRQR | Promoter | CCAGGCTGGGA | |
| | | | ABE | | | |
| gRNA-#13 | ABE_NGA_20nt_ | spCas9 | spCas9 | TTR | AGTATAAAAGCC | 985 |
| | 3-12_019 | | VRQR | Promoter | CCAGGCTGGGA | |
| | | | IBE | | | |
| gRNA-#14 | ABE_NGG_20nt_ | spCas9 | spCas9 | TTR | AGTCAATAATCA | 986 |
| | 3-9_002 | | ABE | Promoter | GAATCAGCAGG | |
| gRNA-#14 | CBE_NGG_20nt_ | spCas9 | spCas9 | TTR | AGTCAATAATCA | 986 |
| | 4-9_003 | | CBE | Promoter | GAATCAGCAGG | |
| gRNA-#14 | ABE_NGG_20nt_ | spCas9 | spCas9 | TTR | AGTCAATAATCA | 986 |
| | 3-12_018 | | IBE | Promoter | GAATCAGCAGG | |
| gRNA-#15 | ABE_NGC_20nt_ | spCas9 | spCas9 | TTR | ATAATCAGAATC | 987 |
| | 3-9_008 | | NGC | Promoter | AGCAGGTTTGC | |
| | | | ABE | | | |
| gRNA-#15 | CBE_NGC_20nt_ | spCas9 | spCas9 | TTR | ATAATCAGAATC | 987 |
| | 4-9_009 | | NGC | Promoter | AGCAGGTTTGC | |
| | | | CBE | | | |
| gRNA-#15 | ABE_NGC_20nt_ | spCas9 | spCas9 | TTR | ATAATCAGAATC | 987 |
| | 3-12_020 | | NGC IBE | Promoter | AGCAGGTTTGC | |
| gRNA-#16 | ABE_VTTN_ | cas12b | cas12b | TTR | ATTATTGACTTA | 988 |
| | 22nt_5-9_017 | | ABE | Promoter | GTCAACAAAGAG | |
| | | | | | AG | |
| gRNA-#17 | ABE_VTTN_ | cas12b | cas 12b | TTR | ATTCTCTCTTTG | 989 |
| | 22nt_5-9_017 | | ABE | Promoter | TTGACTAAGTCA | |
| | | | | | AT | |
| gRNA-#18 | ABE_VTTN_ | cas12b | cas12b | TTR | ATTCTGATTATT | 990 |
| | 22nt_5-9_017 | | ABE | Promoter | GACTTAGTCAAC | |
| | | | | | AA | |
| gRNA-#19 | ABE_VTTN_ | cas12b | cas 12b | TTR | ATTCTTGGCAGG | 991 |
| (sgRNA 36 | 22nt_5-9_017 | | ABE | Promoter | ATGGCTTCTCAT | |
| 7) | | | | | CG | |
| gRNA-#20 | ABE_VTTN_ | cas 12b | cas12b | TTR | ATTGACTTAGTC | 992 |
| | 22nt_5-9_017 | | ABE | Promoter | AACAAAGAGAGA | |
| | | | | | AT | |
| gRNA-#21 | ABE_VTTN_ | cas12b | cas12b | TTR | ATTGGCAGGGAT | 993 |
| | 22nt_5-9_017 | | ABE | Promoter | AAGCAGCCTAGC | |
| | | | | | TC | |
| gRNA-#22 | ABE_VTTN_ | cas12b | cas 12b | TTR | ATTTGTATGGGT | 994 |
| | 22nt_5-9_017 | | ABE | Promoter | TACTTATTCTCT | |
| | | | | | CT | |
| gRNA-#23 | CBE_NGA_20nt_ | spCas9 | spCas9 | TTR | CAAGAATGAGTG | 995 |
| | 4-9_006 | | VRQR | Promoter | GACTTCTGTGA | |
| | | | CBE | | | |
| gRNA-#23 | ABE_NGA_20nt_ | spCas9 | spCas9 | TTR | CAAGAATGAGTG | 995 |
| | 3-9_005 | | VRQR | Promoter | GACTTCTGTGA | |
| | | | ABE | | | |
| gRNA-#23 | ABE_NGA_20nt_ | spCas9 | spCas9 | TTR | CAAGAATGAGTG | 995 |
| | 3-12_019 | | VRQR | Promoter | GACTTCTGTGA | |
| | | | IBE | | | |
| gRNA-#24 | CBE_NGA_20nt_ | spCas9 | spCas9 | TTR | CAATCTGACTGC | 996 |
| | 4-9_006 | | VRQR | Promoter | AAACCTGCTGA | |
| | | | CBE | | | |
| gRNA-#24 | ABE_NGA_20nt_ | spCas9 | spCas9 | TTR | CAATCTGACTGC | 996 |
| | 3-9_005 | | VRQR | Promoter | AAACCTGCTGA | |
| | | | ABE | | | |
| gRNA-#24 | ABE_NGA_20nt_ | spCas9 | spCas9 | TTR | CAATCTGACTGC | 996 |
| | 3-12_019 | | VRQR | Promoter | AAACCTGCTGA | |
| | | | IBE | | | |
| gRNA-#25 | ABE_NGG_20nt_ | spCas9 | spCas9 | TTR | CACAGAAGTCCA | 997 |
| | 3-9_002 | | ABE | Promoter | CTCATTCTTGG | |
| gRNA-#25 | CBE_NGG_20nt_ | spCas9 | spCas9 | TTR | CACAGAAGTCCA | 997 |
| | 4-9_003 | | CBE | Promoter | CTCATTCTTGG | |
| gRNA-#25 | ABE_NGG_20nt_ | spCas9 | spCas9 | TTR | CACAGAAGTCCA | 997 |
| | 3-12_018 | | IBE | Promoter | CTCATTCTTGG | |
| gRNA-#26 | ABE_NGC_20nt_ | spCas9 | spCas9 | TTR | CAGACGATGAGA | 998 |
| | 3-9_008 | | NGC | Promoter | AGCCATCCTGC | |
| | | | ABE | | | |
| gRNA-#26 | CBE_NGC_20nt_ | spCas9 | spCas9 | TTR | CAGACGATGAGA | 998 |
| | 4-9_009 | | NGC | Promoter | AGCCATCCTGC | |
| | | | CBE | | | |
| gRNA-#26 | ABE_NGC_20nt_ | spCas9 | spCas9 | TTR | CAGACGATGAGA | 998 |
| | 3-12_020 | | NGC IBE | Promoter | AGCCATCCTGC | |
| gRNA-#27 | ABE_NGG_20nt_ | spCas9 | spCas9 | TTR | CAGCAGGTTTGC | 999 |
| | 3-9_002 | | ABE | Promoter | AGTCAGATTGG | |
| gRNA-#27 | CBE_NGG_20nt_ | spCas9 | spCas9 | TTR | CAGCAGGTTTGC | 999 |
| | 4-9_003 | | CBE | Promoter | AGTCAGATTGG | |
| gRNA-#27 | ABE_NGG_20nt_ | spCas9 | spCas9 | TTR | CAGCAGGTTTGC | 999 |
| | 3-12_018 | | IBE | Promoter | AGTCAGATTGG | |
| gRNA-#28 | ABE_NGC_20nt_ | spCas9 | spCas9 | TTR | CAGGATGGCTTC | 1000 |
| | 3-9_008 | | NGC | Promoter | TCATCGTCTGC | |
| | | | ABE | | | |
| gRNA-#28 | CBE_NGC_20nt_ | spCas9 | spCas9 | TTR | CAGGATGGCTTC | 1000 |
| | 4-9_009 | | NGC | Promoter | TCATCGTCTGC | |
| | | | CBE | | | |
| gRNA-#28 | ABE_NGC_20nt_ | spCas9 | spCas9 | TTR | CAGGATGGCTTC | 1000 |
| | 3-12_020 | | NGC IBE | Promoter | TCATCGTCTGC | |
| gRNA-#29 | ABE_NNGRRT_ | saCas9 | saCas9 | TTR | CAGGTTTGCAGT | 1001 |
| | 21nt_5-14_011 | | ABE | Promoter | CAGATTGGCAGG | |
| | | | | | GAT | |
| gRNA-#29 | CBE_NNGRRT_ | saCas9 | saCas9 | TTR | CAGGTTTGCAGT | 1001 |
| | 21nt_3-12_012 | | CBE | Promoter | CAGATTGGCAGG | |
| | | | | | GAT | |
| gRNA-#30 | ABE_NGC_20nt_ | spCas9 | spCas9 | TTR | CAGTCAGATTGG | 1002 |
| | 3-9_008 | | NGC | Promoter | CAGGGATAAGC | |
| | | | ABE | | | |
| gRNA-#30 | CBE_NGC_20nt_ | spCas9 | spCas9 | TTR | CAGTCAGATTGG | 1002 |
| | 4-9_009 | | NGC | Promoter | CAGGGATAAGC | |
| | | | CBE | | | |
| gRNA-#30 | ABE_NGC_20nt_ | spCas9 | spCas9 | TTR | CAGTCAGATTGG | 1002 |
| | 3-12_020 | | NGC IBE | Promoter | CAGGGATAAGC | |
| gRNA-#31 | ABE_NGC_20nt_ | spCas9 | spCas9 | TTR | CCACTCATTCTT | 1003 |
| | 3-9_008 | | NGC | Promoter | GGCAGGATGGC | |
| | | | ABE | | | |
| gRNA-#31 | CBE_NGC_20nt_ | spCas9 | spCas9 | TTR | CCACTCATTCTT | 1003 |
| | 4-9_009 | | NGC | Promoter | GGCAGGATGGC | |
| | | | CBE | | | |
| gRNA-#31 | ABE_NGC_20nt_ | spCas9 | spCas9 | TTR | CCACTCATTCTT | 1003 |
| | 3-12_020 | | NGC IBE | Promoter | GGCAGGATGGC | |
| gRNA-#32 | ABE_NGC_20nt_ | spCas9 | spCas9 | TTR | CTAAGTCAATAA | 1004 |
| | 3-9_008 | | NGC | Promoter | TCAGAATCAGC | |
| | | | ABE | | | |
| gRNA-#32 | CBE_NGC_20nt_ | spCas9 | spCas9 | TTR | CTAAGTCAATAA | 1004 |
| | 4-9_009 | | NGC | Promoter | TCAGAATCAGC | |
| | | | CBE | | | |
| gRNA-#32 | ABE_NGC_20nt_ | spCas9 | spCas9 | TTR | CTAAGTCAATAA | 1004 |
| | 3-12_020 | | NGC IBE | Promoter | TCAGAATCAGC | |
| gRNA-#33 | ABE_VTTN_ | cas12b | cas12b | TTR | CTTAGTCAACAA | 1005 |
| | 22nt_5-9_017 | | ABE | Promoter | AGAGAGAATAAG | |
| | | | | | TA | |
| gRNA-#34 | ABE_NGC_20nt_ | spCas9 | spCas9 | TTR | CTTATCCCTGCC | 1006 |
| | 3-9_008 | | NGC | Promoter | AATCTGACTGC | |
| | | | ABE | | | |
| gRNA-#34 | CBE_NGC_20nt_ | spCas9 | spCas9 | TTR | CTTATCCCTGCC | 1006 |
| | 4-9_009 | | NGC | Promoter | AATCTGACTGC | |
| | | | CBE | | | |
| gRNA-#34 | ABE_NGC_20nt_ | spCas9 | spCas9 | TTR | CTTATCCCTGCC | 1006 |
| | 3-12_020 | | NGC IBE | Promoter | AATCTGACTGC | |
| gRNA-#35 | ABE_VTTN_ | cas12b | cas12b | TTR | CTTATCCCTGCC | 1007 |
| | 22nt_5-9_017 | | ABE | Promoter | AATCTGACTGCA | |
| | | | | | AA | |
| gRNA-#36 | ABE_VTTN_ | cas12b | cas12b | TTR | CTTATTCTCTCT | 1008 |
| | 22nt_5-9_017 | | ABE | Promoter | TTGTTGACTAAG | |
| | | | | | TC | |
| gRNA-#37 | ABE_VTTN_ | cas12b | cas12b | TTR | CTTCTCCTGAGC | 1009 |
| | 22nt_5-9_017 | | ABE | Promoter | TAGGCTGCTTAT | |
| | | | | | CC | |
| gRNA-#38 | ABE_NGC_20nt_ | spCas9 | spCas9 | TTR | CTTCTGTGATGG | 1010 |
| | 3-9_008 | | NGC | Promoter | CTGCTCCCAGC | |
| | | | ABE | | | |
| gRNA-#38 | CBE_NGC_20nt_ | spCas9 | spCas9 | TTR | CTTCTGTGATGG | 1010 |
| | 4-9_009 | | NGC | Promoter | CTGCTCCCAGC | |
| | | | CBE | | | |
| gRNA-#38 | ABE_NGC_20nt_ | spCas9 | spCas9 | TTR | CTTCTGTGATGG | 1010 |
| | 3-12_020 | | NGC IBE | Promoter | CTGCTCCCAGC | |
| gRNA-#39 | ABE_VTTN_ | cas12b | cas 12b | TTR | CTTCTGTGATGG | 1011 |
| | 22nt_5-9_017 | | ABE | Promoter | CTGCTCCCAGCC | |
| | | | | | TG | |
| gRNA-#40 | ABE_VTTN_ | cas12b | cas12b | TTR | CTTGGCAGGATG | 1012 |
| | 22nt_5-9_017 | | ABE | Promoter | GCTTCTCATCGT | |
| | | | | | CT | |
| gRNA-#41 | ABE_VTTN_ | cas12b | cas12b | TTR | CTTGTCTAGAGA | 1013 |
| | 22nt_5-9_017 | | ABE | Promoter | GATTAGAGCATC | |
| | | | | | GG | |
| gRNA-#42 | ABE_VTTN_ | cas12b | cas12b | TTR | CTTTGTTGACTA | 1014 |
| | 22nt_5-9_017 | | ABE | Promoter | AGTCAATAATCA | |
| | | | | | GA | |
| gRNA-#43 | ABE_VTTN_ | cas12b | cas12b | TTR | CTTTTATACTCA | 1015 |
| | 22nt_5-9_017 | | ABE | Promoter | CTTCTCCTGAGC | |
| | | | | | TA | |
| gRNA-#44 | ABE_NGG_20nt_ | spCas9 | spCas9 | TTR | GAAGTGAGTATA | 1016 |
| | 3-9_002 | | ABE | Promoter | AAAGCCCCAGG | |
| gRNA-#44 | CBE_NGG_20nt_ | spCas9 | spCas9 | TTR | GAAGTGAGTATA | 1016 |
| | 4-9_003 | | CBE | Promoter | AAAGCCCCAGG | |
| gRNA-#44 | ABE_NGG_20nt_ | spCas9 | spCas9 | TTR | GAAGTGAGTATA | 1016 |
| | 3-12_018 | | IBE | Promoter | AAAGCCCCAGG | |
| gRNA-#45 | ABE_NGG_20nt_ | spCas9 | spCas9 | TTR | GACAAGGTTCAT | 1017 |
| | 3-9_002 | | ABE | Promoter | ATTTGTATGGG | |
| gRNA-#45 | CBE_NGG_20nt_ | spCas9 | spCas9 | TTR | GACAAGGTTCAT | 1017 |
| | 4-9_003 | | CBE | Promoter | ATTTGTATGGG | |
| gRNA-#45 | ABE_NGG_20nt_ | spCas9 | spCas9 | TTR | GACAAGGTTCAT | 1017 |
| | 3-12_018 | | IBE | Promoter | ATTTGTATGGG | |
| gRNA-#46 | ABE_NGG_20nt_ | spCas9 | spCas9 | TTR | GAGTATAAAAGC | 1018 |
| | 3-9_002 | | ABE | Promoter | CCCAGGCTGGG | |
| gRNA-#46 | CBE_NGG_20nt_ | spCas9 | spCas9 | TTR | GAGTATAAAAGC | 1018 |
| | 4-9_003 | | CBE | Promoter | CCCAGGCTGGG | |
| gRNA-#46 | ABE_NGG_20nt_ | spCas9 | spCas9 | TTR | GAGTATAAAAGC | 1018 |
| | 3-12_018 | | IBE | Promoter | CCCAGGCTGGG | |
| gRNA-#47 | ABE_NGC_20nt_ | spCas9 | spCas9 | TTR | GAGTGGACTTCT | 1019 |
| | 3-9_008 | | NGC | Promoter | GTGATGGCTGC | |
| | | | ABE | | | |
| gRNA-#47 | CBE_NGC_20nt_ | spCas9 | spCas9 | TTR | GAGTGGACTTCT | 1019 |
| | 4-9_009 | | NGC | Promoter | GTGATGGCTGC | |
| | | | CBE | | | |
| gRNA-#47 | ABE_NGC_20nt_ | spCas9 | spCas9 | TTR | GAGTGGACTTCT | 1019 |
| | 3-12_020 | | NGC IBE | Promoter | GTGATGGCTGC | |
| gRNA-#48 | ABE_NGC_20nt_ | spCas9 | spCas9 | TTR | GATGGCTGCTCC | 1020 |
| | 3-9_008 | | NGC | Promoter | CAGCCTGGGGC | |
| | | | ABE | | | |
| gRNA-#48 | CBE_NGC_20nt_ | spCas9 | spCas9 | TTR | GATGGCTGCTCC | 1020 |
| | 4-9_009 | | NGC | Promoter | CAGCCTGGGGC | |
| | | | CBE | | | |
| gRNA-#48 | ABE_NGC_20nt_ | spCas9 | spCas9 | TTR | GATGGCTGCTCC | 1020 |
| | 3-12_020 | | NGC IBE | Promoter | CAGCCTGGGGC | |
| gRNA-#48 | CBE_NGA_20nt_ | spCas9 | spCas9 | TTR | GCAGCCTAGCTC | 1021 |
| | 4-9_006 | | VRQR | Promoter | AGGAGAAGTGA | |
| | | | CBE | | | |
| gRNA-#48 | ABE_NGA_20nt_ | spCas9 | spCas9 | TTR | GCAGCCTAGCTC | 1021 |
| | 3-9_005 | | VRQR | Promoter | AGGAGAAGTGA | |
| | | | ABE | | | |
| gRNA-#48 | ABE_NGA_20nt_ | spCas9 | spCas9 | TTR | GCAGCCTAGCTC | 1021 |
| | 3-12_019 | | VRQR | Promoter | AGGAGAAGTGA | |
| | | | IBE | | | |
| gRNA-#50 | CBE_NGA_20nt_ | spCas9 | spCas9 | TTR | GCTGCTTATCCC | 1022 |
| | 4-9_006 | | VRQR | Promoter | TGCCAATCTGA | |
| | | | CBE | | | |
| gRNA-#50 | ABE_NGA_20nt_ | spCas9 | spCas9 | TTR | GCTGCTTATCCC | 1022 |
| | 3-9_005 | | VRQR | Promoter | TGCCAATCTGA | |
| | | | ABE | | | |
| gRNA-#50 | ABE_NGA_20nt_ | spCas9 | spCas9 | TTR | GCTGCTTATCCC | 1022 |
| | 3-12_019 | | VRQR | Promoter | TGCCAATCTGA | |
| | | | IBE | | | |
| gRNA-#51 | CBE_NGA_20nt_ | spCas9 | spCas9 | TTR | GGGATAAGCAGC | 1023 |
| | 4-9_006 | | VRQR | Promoter | CTAGCTCAGGA | |
| | | | CBE | | | |
| gRNA-#51 | ABE_NGA_20nt_ | spCas9 | spCas9 | TTR | GGGATAAGCAGC | 1023 |
| | 3-9_005 | | VRQR | Promoter | CTAGCTCAGGA | |
| | | | ABE | | | |
| gRNA-#51 | ABE_NGA_20nt_ | spCas9 | spCas9 | TTR | GGGATAAGCAGC | 1023 |
| | 3-12_019 | | VRQR | Promoter | CTAGCTCAGGA | |
| | | | IBE | | | |
| gRNA-#52 | ABE_NGG_20nt_ | spCas9 | spCas9 | TTR | GGTTTGCAGTCA | 1024 |
| | 3-9_002 | | ABE | Promoter | GATTGGCAGGG | |
| gRNA-#52 | CBE_NGG_20nt_ | spCas9 | spCas9 | TTR | GGTTTGCAGTCA | 1024 |
| | 4-9_003 | | CBE | Promoter | GATTGGCAGGG | |
| gRNA-#52 | ABE_NGG_20nt_ | spCas9 | spCas9 | TTR | GGTTTGCAGTCA | 1024 |
| | 3-12_018 | | IBE | Promoter | GATTGGCAGGG | |
| gRNA-#53 | CBE_NGA_20nt_ | spCas9 | spCas9 | TTR | GTTACTTATTCT | 1025 |
| | 4-9_006 | | VRQR | Promoter | CTCTTTGTTGA | |
| | | | CBE | | | |
| gRNA-#53 | ABE_NGA_20nt_ | spCas9 | spCas9 | TTR | GTTACTTATTCT | 1025 |
| | 3-9_005 | | VRQR | Promoter | CTCTTTGTTGA | |
| | | | ABE | | | |
| gRNA-#53 | ABE_NGA_20nt_ | spCas9 | spCas9 | TTR | GTTACTTATTCT | 1025 |
| | 3-12_019 | | VRQR | Promoter | CTCTTTGTTGA | |
| | | | IBE | | | |
| gRNA-#54 | ABE_VTTN_ | cas12b | cas12b | TTR | GTTACTTATTCT | 1026 |
| | 22nt_5-9_017 | | ABE | Promoter | CTCTTTGTTGAC | |
| | | | | | TA | |
| gRNA-#55 | ABE_VTTN_ | cas12b | cas12b | TTR | GTTCATATTTGT | 1027 |
| | 22nt_5-9_017 | | ABE | Promoter | ATGGGTTACTTA | |
| | | | | | TT | |
| gRNA-#56 | ABE_VTTN_ | cas12b | cas12b | TTR | GTTGACTAAGTC | 1028 |
| | 22nt_5-9_017 | | ABE | Promoter | AATAATCAGAAT | |
| | | | | | CA | |
| gRNA-#57 | CBE_NGA_20nt_ | spCas9 | spCas9 | TTR | GTTTGCAGTCAG | 1029 |
| | 4-9_006 | | VRQR | Promoter | ATTGGCAGGGA | |
| | | | CBE | | | |
| gRNA-#57 | ABE_NGA_20nt_ | spCas9 | spCas9 | TTR | GTTTGCAGTCAG | 1029 |
| | 3-9_005 | | VRQR | Promoter | ATTGGCAGGGA | |
| | | | ABE | | | |
| gRNA-#57 | ABE_NGA_20nt_ | spCas9 | spCas9 | TTR | GTTTGCAGTCAG | 1029 |
| | 3-12_019 | | VRQR | Promoter | ATTGGCAGGGA | |
| | | | IBE | | | |
| gRNA-#58 | ABE_VTTN_ | cas12b | cas12b | TTR | GTTTGCAGTCAG | 1030 |
| | 22nt_5-9_017 | | ABE | Promoter | ATTGGCAGGGAT | |
| | | | | | AA | |
| gRNA-#59 | CBE_NGA_20nt_ | spCas9 | spCas9 | TTR | TACAAATATGAA | 1031 |
| | 4-9_006 | | VRQR | Promoter | CCTTGTCTAGA | |
| | | | CBE | | | |
| gRNA-#59 | ABE_NGA_20nt_ | spCas9 | spCas9 | TTR | TACAAATATGAA | 1031 |
| | 3-9_005 | | VRQR | Promoter | CCTTGTCTAGA | |
| | | | ABE | | | |
| gRNA-#59 | ABE_NGA_20nt_ | spCas9 | spCas9 | TTR | TACAAATATGAA | 1031 |
| | 3-12_019 | | VRQR | Promoter | CCTTGTCTAGA | |
| | | | IBE | | | |
| gRNA-#60 | ABE_NGC_20nt_ | spCas9 | spCas9 | TTR | TACTCACTTCTC | 1032 |
| | 3-9_008 | | NGC | Promoter | CTGAGCTAGGC | |
| | | | ABE | | | |
| gRNA-#60 | CBE_NGC_20nt_ | spCas9 | spCas9 | TTR | TACTCACTTCTC | 1032 |
| | 4-9_009 | | NGC | Promoter | CTGAGCTAGGC | |
| | | | CBE | | | |
| gRNA-#60 | ABE_NGC_20nt_ | spCas9 | spCas9 | TTR | TACTCACTTCTC | 1032 |
| | 3-12_020 | | NGC IBE | Promoter | CTGAGCTAGGC | |
| gRNA-#61 | ABE_NGC_20nt_ | spCas9 | spCas9 | TTR | TATAAAAGCCCC | 1033 |
| | 3-9_008 | | NGC | Promoter | AGGCTGGGAGC | |
| | | | ABE | | | |
| gRNA-#61 | CBE_NGC_20nt_ | spCas9 | spCas9 | TTR | TATAAAAGCCCC | 1033 |
| | 4-9_009 | | NGC | Promoter | AGGCTGGGAGC | |
| | | | CBE | | | |
| gRNA-#61 | ABE_NGC_20nt_ | spCas9 | spCas9 | TTR | TATAAAAGCCCC | 1033 |
| | 3-12_020 | | NGC IBE | Promoter | AGGCTGGGAGC | |
| gRNA-#62 | ABE_NGC_20nt_ | spCas9 | spCas9 | TTR | TCACTTCTCCTG | 1034 |
| | 3-9_008 | | NGC | Promoter | AGCTAGGCTGC | |
| | | | ABE | | | |
| gRNA-#62 | CBE_NGC_20nt_ | spCas9 | spCas9 | TTR | TCACTTCTCCTG | 1034 |
| | 4-9_009 | | NGC | Promoter | AGCTAGGCTGC | |
| | | | CBE | | | |
| gRNA-#62 | ABE_NGC_20nt_ | spCas9 | spCas9 | TTR | TCACTTCTCCTG | 1034 |
| | 3-12_020 | | NGC IBE | Promoter | AGCTAGGCTGC | |
| gRNA-#63 | ABE_NGC_20nt_ | spCas9 | spCas9 | TTR | TCAGATTGGCAG | 1035 |
| | 3-9_008 | | NGC | Promoter | GGATAAGCAGC | |
| | | | ABE | | | |
| gRNA-#63 | CBE_NGC_20nt_ | spCas9 | spCas9 | TTR | TCAGATTGGCAG | 1035 |
| | 4-9_009 | | NGC | Promoter | GGATAAGCAGC | |
| | | | CBE | | | |
| gRNA-#63 | ABE_NGC_20nt_ | spCas9 | spCas9 | TTR | TCAGATTGGCAG | 1035 |
| | 3-12_020 | | NGC IBE | Promoter | GGATAAGCAGC | |
| gRNA-#64 | ABE_NGC_20nt_ | spCas9 | spCas9 | TTR | TCAGGAGAAGTG | 1036 |
| | 3-9_008 | | NGC | Promoter | AGTATAAAAGC | |
| | | | ABE | | | |
| gRNA-#64 | CBE_NGC_20nt_ | spCas9 | spCas9 | TTR | TCAGGAGAAGTG | 1036 |
| | 4-9_009 | | NGC | Promoter | AGTATAAAAGC | |
| | | | CBE | | | |
| gRNA-#64 | ABE_NGC_20nt_ | spCas9 | spCas9 | TTR | TCAGGAGAAGTG | 1036 |
| | 3-12_020 | | NGC IBE | Promoter | AGTATAAAAGC | |
| gRNA-#65 | ABE_NNNRRT_ | saCas9 | saCas9 | TTR | TCTGACTGCAAA | 1037 |
| | 21nt_5-14_014 | | KKH | Promoter | CCTGCTGATTCT | |
| | | | ABE | | GAT | |
| gRNA-#65 | CBE_NNNRRT_ | saCas9 | saCas9 | TTR | TCTGACTGCAAA | 1037 |
| | 21nt_3-12_015 | | KKH | Promoter | CCTGCTGATTCT | |
| | | | CBE | | GAT | |
| gRNA-#66 | ABE_NGC_20nt_ | spCas9 | spCas9 | TTR | TGAGCTAGGCTG | 1038 |
| | 3-9_008 | | NGC | Promoter | CTTATCCCTGC | |
| | | | ABE | | | |
| gRNA-#66 | CBE_NGC_20nt_ | spCas9 | spCas9 | TTR | TGAGCTAGGCTG | 1038 |
| | 4-9_009 | | NGC | Promoter | CTTATCCCTGC | |
| | | | CBE | | | |
| gRNA-#66 | ABE_NGC_20nt_ | spCas9 | spCas9 | TTR | TGAGCTAGGCTG | 1038 |
| | 3-12_020 | | NGC IBE | Promoter | CTTATCCCTGC | |
| gRNA-#67 | ABE_NGC_20nt_ | spCas9 | spCas9 | TTR | TGCCAATCTGAC | 1039 |
| | 3-9_008 | | NGC | Promoter | TGCAAACCTGC | |
| | | | ABE | | | |
| gRNA-#67 | CBE_NGC_20nt_ | spCas9 | spCas9 | TTR | TGCCAATCTGAC | 1039 |
| | 4-9_009 | | NGC | Promoter | TGCAAACCTGC | |
| | | | CBE | | | |
| gRNA-#67 | ABE_NGC_20nt_ | spCas9 | spCas9 | TTR | TGCCAATCTGAC | 1039 |
| | 3-12_020 | | NGC IBE | Promoter | TGCAAACCTGC | |
| gRNA-#68 | ABE_NGG_20nt_ | spCas9 | spCas9 | TTR | TGCTCTAATCTC | 1040 |
| | 3-9_002 | | ABE | Promoter | TCTAGACAAGG | |
| gRNA-#68 | CBE_NGG_20nt_ | spCas9 | spCas9 | TTR | TGCTCTAATCTC | 1040 |
| | 4-9_003 | | CBE | Promoter | TCTAGACAAGG | |
| gRNA-#68 | ABE_NGG_20nt_ | spCas9 | spCas9 | TTR | TGCTCTAATCTC | 1040 |
| | 3-12_018 | | IBE | Promoter | TCTAGACAAGG | |
| gRNA-#69 | ABE_NGG_20nt_ | spCas9 | spCas9 | TTR | TGTGATGGCTGC | 1041 |
| | 3-9_002 | | ABE | Promoter | TCCCAGCCTGG | |
| gRNA-#69 | CBE_NGG_20nt_ | spCas9 | spCas9 | TTR | TGTGATGGCTGC | 1041 |
| | 4-9_003 | | CBE | Promoter | TCCCAGCCTGG | |
| gRNA-#69 | ABE_NGG_20nt_ | spCas9 | spCas9 | TTR | TGTGATGGCTGC | 1041 |
| | 3-12_018 | | IBE | Promoter | TCCCAGCCTGG | |
| gRNA-#70 | ABE_NGC_20nt_ | spCas9 | spCas9 | TTR | TTGGCAGGGATA | 1042 |
| | 3-9_008 | | NGC | Promoter | AGCAGCCTAGC | |
| | | | ABE | | | |
| gRNA-#70 | CBE_NGC_20nt_ | spCas9 | spCas9 | TTR | TTGGCAGGGATA | 1042 |
| | 4-9_009 | | NGC | Promoter | AGCAGCCTAGC | |
| | | | CBE | | | |
| gRNA-#70 | ABE_NGC_20nt_ | spCas9 | spCas9 | TTR | TTGGCAGGGATA | 1042 |
| | 3-12_020 | | NGC IBE | Promoter | AGCAGCCTAGC | |
| gRNA-#71 | ABE_NGC_20nt_ | spCas9 | spCas9 | TTR | TTTTATACTCAC | 1043 |
| | 3-9_008 | | NGC | Promoter | TTCTCCTGAGC | |
| | | | ABE | | | |
| gRNA-#71 | CBE_NGC_20nt_ | spCas9 | spCas9 | TTR | TTTTATACTCAC | 1043 |
| | 4-9_009 | | NGC | Promoter | TTCTCCTGAGC | |
| | | | CBE | | | |
| gRNA-#71 | ABE_NGC_20nt_ | spCas9 | spCas9 | TTR | TTTTATACTCAC | 1043 |
| | 3-12_020 | | NGC IBE | Promoter | TTCTCCTGAGC | |

| | | Human | | | | Target |
|---|---|---|---|---|---|---|
| gRNA | | Chromosome | Start | | | Base |
| Name | PAM | Location | Site | End Site | Strand | Position(s) |
| gRNA1594 | GGC | chr18 | 31593011 | 31593034 | − | 8 |
| gRNA1594 | GGC | chr18 | 31593011 | 31593034 | − | 7 |
| gRNA1594 | GGC | chr18 | 31593011 | 31593034 | − | 7 |
| gRNA1595 | AGC | chr18 | 31592994 | 31593017 | − | 9 |
| gRNA1596 | AGC | chr18 | 31592991 | 31593014 | − | 7, 6 |
| gRNA1597 | AGC | chr18 | 31598558 | 31598581 | + | 8 |
| gRNA1597 | AGC | chr18 | 31598558 | 31598581 | + | 8 |
| gRNA1598 | TGG | chr18 | 31595114 | 31595137 | + | 4 |
| gRNA1599 | TGG | chr18 | 31595239 | 31595262 | − | 6 |
| gRNA1600 | TGG | chr18 | 31593012 | 31593035 | − | 8 |
| gRNA1601 | TGC | chr18 | 31595245 | 31595268 | − | 12 |
| gRNA1602 | AGC | chr18 | 31591959 | 31591982 | − | 10 |
| gRNA1603 | TGA | chr18 | 31592883 | 31592906 | + | 11 |
| gRNA1604 | TGA | chr18 | 31595108 | 31595131 | + | 10 |
| gRNA1605 | GGA | chr18 | 31595115 | 31595138 | + | 3 |
| gRNA1606 | GGA | chr18 | 31595238 | 31595261 | − | 5 |
| gRNA1607 | AGA | chr18 | 31591953 | 31591976 | − | 4 |
| gRNA1746 | TGA | chr18 | 31591776 | 31591799 | − | |
| gRNA1746 | TGA | chr18 | 31591776 | 31591799 | − | |
| gRNA1746 | TGA | chr18 | 31591776 | 31591799 | − | |
| gRNA1747 | ACAAAT | chr18 | 31591738 | 31591765 | − | |
| gRNA1747 | ACAAAT | chr18 | 31591738 | 31591765 | − | |
| gRNA1748 | GTGAGT | chr18 | 31591820 | 31591847 | + | |
| gRNA1748 | GTGAGT | chr18 | 31591820 | 31591847 | + | |
| gRNA1749 | GGA | chr18 | 31591880 | 31591903 | + | |
| gRNA1749 | GGA | chr18 | 31591880 | 31591903 | + | |
| gRNA1749 | GGA | chr18 | 31591880 | 31591903 | + | |
| gRNA1750 | AAGAAT | chr18 | 31591890 | 31591917 | − | |
| gRNA1750 | AAGAAT | chr18 | 31591890 | 31591917 | − | |
| gRNA1751 | TGG | chr18 | 31591725 | 31591748 | + | |
| gRNA1751 | TGG | chr18 | 31591725 | 31591748 | + | |
| gRNA1751 | TGG | chr18 | 31591725 | 31591748 | + | |
| gRNA1752 | AGA | chr18 | 31591858 | 31591881 | + | |
| gRNA1752 | AGA | chr18 | 31591858 | 31591881 | + | |
| gRNA1752 | AGA | chr18 | 31591858 | 31591881 | + | |
| gRNA1753 | TGA | chr18 | 31591734 | 31591757 | − | |
| gRNA1753 | TGA | chr18 | 31591734 | 31591757 | − | |
| gRNA1753 | TGA | chr18 | 31591734 | 31591757 | − | |
| gRNA1754 | AGG | chr18 | 31591826 | 31591849 | − | |
| gRNA1754 | AGG | chr18 | 31591826 | 31591849 | − | |
| gRNA1754 | AGG | chr18 | 31591826 | 31591849 | − | |
| gRNA1755 | AGA | chr18 | 31591761 | 31591784 | − | |
| gRNA1755 | AGA | chr18 | 31591761 | 31591784 | − | |
| gRNA1755 | AGA | chr18 | 31591761 | 31591784 | − | |
| gRNA1756 | AGA | chr18 | 31591720 | 31591743 | − | |
| gRNA1756 | AGA | chr18 | 31591720 | 31591743 | − | |
| gRNA1756 | AGA | chr18 | 31591720 | 31591743 | − | |
| gRNA1757 | CAGGAT | chr18 | 31591877 | 31591904 | + | |
| gRNA1757 | CAGGAT | chr18 | 31591877 | 31591904 | + | |
| gRNA1758 | AGAAGT | chr18 | 31591857 | 31591884 | + | |
| gRNA1758 | AGAAGT | chr18 | 31591857 | 31591884 | + | |
| gRNA1759 | GGA | chr18 | 31591883 | 31591906 | − | |
| gRNA1759 | GGA | chr18 | 31591883 | 31591906 | − | |
| gRNA1759 | GGA | chr18 | 31591883 | 31591906 | − | |
| gRNA1760 | CTTAGT | chr18 | 31591770 | 31591797 | − | |
| gRNA1760 | CTTAGT | chr18 | 31591770 | 31591797 | − | |
| gRNA1761 | CAAGGT | chr18 | 31591707 | 31591734 | + | |
| gRNA1761 | CAAGGT | chr18 | 31591707 | 31591734 | + | |
| gRNA1762 | GCAGGT | chr18 | 31591771 | 31591798 | + | |
| gRNA1762 | GCAGGT | chr18 | 31591771 | 31591798 | + | |
| gRNA1763 | ATGGGT | chr18 | 31591723 | 31591750 | + | |
| gRNA1763 | ATGGGT | chr18 | 31591723 | 31591750 | + | |
| gRNA1764 | AGA | chr18 | 31591713 | 31591736 | − | |
| gRNA1764 | AGA | chr18 | 31591713 | 31591736 | − | |
| gRNA1764 | AGA | chr18 | 31591713 | 31591736 | − | |
| gRNA1765 | AGG | chr18 | 31591879 | 31591902 | + | |
| gRNA1765 | AGG | chr18 | 31591879 | 31591902 | + | |
| gRNA1765 | AGG | chr18 | 31591879 | 31591902 | + | |
| gRNA1766 | AGA | chr18 | 31591786 | 31591809 | + | |
| gRNA1766 | AGA | chr18 | 31591786 | 31591809 | + | |
| gRNA1766 | AGA | chr18 | 31591786 | 31591809 | + | |
| gRNA1767 | TGG | chr18 | 31591871 | 31591894 | − | |
| gRNA1767 | TGG | chr18 | 31591871 | 31591894 | − | |
| gRNA1767 | TGG | chr18 | 31591871 | 31591894 | − | |
| gRNA1768 | TGA | chr18 | 31591783 | 31591806 | − | |
| gRNA1768 | TGA | chr18 | 31591783 | 31591806 | − | |
| gRNA1768 | TGA | chr18 | 31591783 | 31591806 | − | |
| gRNA1769 | ATAAGT | chr18 | 31591751 | 31591778 | − | |
| gRNA1769 | ATAAGT | chr18 | 31591751 | 31591778 | − | |
| gRNA1770 | AGA | chr18 | 31591817 | 31591840 | + | |
| gRNA1770 | AGA | chr18 | 31591817 | 31591840 | + | |
| gRNA1770 | AGA | chr18 | 31591817 | 31591840 | + | |
| gRNA1771 | AGA | chr18 | 31591892 | 31591915 | − | |
| gRNA1771 | AGA | chr18 | 31591892 | 31591915 | − | |
| gRNA1771 | AGA | chr18 | 31591892 | 31591915 | − | |
| gRNA1772 | TGG | chr18 | 31591884 | 31591907 | − | |
| gRNA1772 | TGG | chr18 | 31591884 | 31591907 | − | |
| gRNA1772 | TGG | chr18 | 31591884 | 31591907 | − | |
| gRNA1773 | TGA | chr18 | 31591832 | 31591855 | − | |
| gRNA1773 | TGA | chr18 | 31591832 | 31591855 | − | |
| gRNA1773 | TGA | chr18 | 31591832 | 31591855 | − | |
| gRNA1774 | AGAAGT | chr18 | 31591816 | 31591843 | + | |
| gRNA1774 | AGAAGT | chr18 | 31591816 | 31591843 | + | |
| gRNA1775 | CGG | chr18 | 31591706 | 31591729 | − | |
| gRNA1775 | CGG | chr18 | 31591706 | 31591729 | − | |
| gRNA1775 | CGG | chr18 | 31591706 | 31591729 | − | |
| gRNA1776 | GGG | chr18 | 31591855 | 31591878 | − | |
| gRNA1776 | GGG | chr18 | 31591855 | 31591878 | − | |
| gRNA1776 | GGG | chr18 | 31591855 | 31591878 | − | |
| gRNA1777 | CTAAGT | chr18 | 31591750 | 31591777 | + | |
| gRNA1777 | CTAAGT | chr18 | 31591750 | 31591777 | + | |
| gRNA1778 | GTCAAT | chr18 | 31591754 | 31591781 | + | |
| gRNA1778 | GTCAAT | chr18 | 31591754 | 31591781 | + | |
| gRNA1779 | AGA | chr18 | 31591759 | 31591782 | − | |
| gRNA1779 | AGA | chr18 | 31591759 | 31591782 | − | |
| gRNA1779 | AGA | chr18 | 31591759 | 31591782 | − | |
| gRNA1780 | GAGAAT | chr18 | 31591755 | 31591782 | − | |
| gRNA1780 | GAGAAT | chr18 | 31591755 | 31591782 | − | |
| gRNA1781 | TCAGAT | chr18 | 31591783 | 31591810 | + | |
| gRNA1781 | TCAGAT | chr18 | 31591783 | 31591810 | + | |
| gRNA1782 | TGG | chr18 | 31591883 | 31591906 | + | |
| gRNA1782 | TGG | chr18 | 31591883 | 31591906 | + | |
| gRNA1782 | TGG | chr18 | 31591883 | 31591906 | + | |
| gRNA1783 | AATAAT | chr18 | 31591757 | 31591784 | + | |
| gRNA1783 | AATAAT | chr18 | 31591757 | 31591784 | + | |
| gRNA1784 | ATGAGT | chr18 | 31591886 | 31591913 | − | |
| gRNA1784 | ATGAGT | chr18 | 31591886 | 31591913 | − | |
| gRNA1785 | GCCAAT | chr18 | 31591808 | 31591835 | − | |
| gRNA1785 | GCCAAT | chr18 | 31591808 | 31591835 | − | |
| gRNA1786 | TGG | chr18 | 31591842 | 31591865 | + | |
| gRNA1786 | TGG | chr18 | 31591842 | 31591865 | + | |
| gRNA1786 | TGG | chr18 | 31591842 | 31591865 | + | |
| gRNA1787 | GGG | chr18 | 31591854 | 31591877 | − | |
| gRNA1787 | GGG | chr18 | 31591854 | 31591877 | − | |
| gRNA1787 | GGG | chr18 | 31591854 | 31591877 | − | |
| gRNA1788 | TGTGAT | chr18 | 31591873 | 31591900 | − | |
| gRNA1788 | TGTGAT | chr18 | 31591873 | 31591900 | − | |
| gRNA1789 | GCTGAT | chr18 | 31591788 | 31591815 | − | |
| gRNA1789 | GCTGAT | chr18 | 31591788 | 31591815 | − | |
| gRNA1790 | AGA | chr18 | 31591765 | 31591788 | + | |
| gRNA1790 | AGA | chr18 | 31591765 | 31591788 | + | |
| gRNA1790 | AGA | chr18 | 31591765 | 31591788 | + | |
| gRNA1791 | AGA | chr18 | 31591757 | 31591780 | − | |
| gRNA1791 | AGA | chr18 | 31591757 | 31591780 | − | |
| gRNA1791 | AGA | chr18 | 31591757 | 31591780 | − | |
| gRNA1792 | CAGAAT | chr18 | 31591763 | 31591790 | + | |
| gRNA1792 | CAGAAT | chr18 | 31591763 | 31591790 | 1 | |
| gRNA-#1 | AGC | chr18 | 31591849 | 31591872 | + | |
| gRNA-#1 | AGC | chr18 | 31591849 | 31591872 | + | |
| gRNA-#1 | AGC | chr18 | 31591849 | 31591872 | + | |
| gRNA-#2 | GGC | chr18 | 31591839 | 31591862 | + | |
| gRNA-#2 | GGC | chr18 | 31591839 | 31591862 | + | |
| gRNA-#2 | GGC | chr18 | 31591839 | 31591862 | + | |
| gRNA-#3 | TGCAGT | chr18 | 31591778 | 31591805 | + | |
| gRNA-#3 | TGCAGT | chr18 | 31591778 | 31591805 | + | |
| gRNA-#4 | AGA | chr18 | 31591718 | 31591741 | − | |
| gRNA-#4 | AGA | chr18 | 31591718 | 31591741 | − | |
| gRNA-#4 | AGA | chr18 | 31591718 | 31591741 | − | |
| gRNA-#5 | GGC | chr18 | 31591870 | 31591893 | − | |
| gRNA-#5 | GGC | chr18 | 31591870 | 31591893 | − | |
| gRNA-#5 | GGC | chr18 | 31591870 | 31591893 | − | |
| gRNA-#6 | AGAGAT | chr18 | 31591717 | 31591744 | − | |
| gRNA-#6 | AGAGAT | chr18 | 31591717 | 31591744 | − | |
| gRNA-#7 | GGC | chr18 | 31591876 | 31591899 | + | |
| gRNA-#7 | GGC | chr18 | 31591876 | 31591899 | + | |
| gRNA-#7 | GGC | chr18 | 31591876 | 31591899 | + | |
| gRNA-#8 | AGC | chr18 | 31591711 | 31591734 | − | |
| gRNA-#8 | AGC | chr18 | 31591711 | 31591734 | − | |
| gRNA-#8 | AGC | chr18 | 31591711 | 31591734 | − | |
| gRNA-#9 | TGA | chr18 | 31591888 | 31591911 | − | |
| gRNA-#9 | TGA | chr18 | 31591888 | 31591911 | − | |
| gRNA-#9 | TGA | chr18 | 31591888 | 31591911 | − | |
| gRNA-#10 | GGC | chr18 | 31591791 | 31591814 | + | |
| gRNA-#10 | GGC | chr18 | 31591791 | 31591814 | + | |
| gRNA-#10 | GGC | chr18 | 31591791 | 31591814 | + | |
| gRNA-#11 | AGG | chr18 | 31591814 | 31591837 | + | |
| gRNA-#11 | AGG | chr18 | 31591814 | 31591837 | 1 | |
| gRNA-#11 | AGG | chr18 | 31591814 | 31591837 | + | |
| gRNA-#12 | AGG | chr18 | 31591794 | 31591817 | + | |
| gRNA-#12 | AGG | chr18 | 31591794 | 31591817 | + | |
| gRNA-#12 | AGG | chr18 | 31591794 | 31591817 | + | |
| gRNA-#13 | GGA | chr18 | 31591844 | 31591867 | + | |
| gRNA-#13 | GGA | chr18 | 31591844 | 31591867 | + | |
| gRNA-#13 | GGA | chr18 | 31591844 | 31591867 | + | |
| gRNA-#14 | AGG | chr18 | 31591774 | 31591797 | + | |
| gRNA-#14 | AGG | chr18 | 31591774 | 31591797 | + | |
| gRNA-#14 | AGG | chr18 | 31591774 | 31591797 | + | |
| gRNA-#15 | TGC | chr18 | 31591779 | 31591802 | + | |
| gRNA-#15 | TGC | chr18 | 31591779 | 31591802 | + | |
| gRNA-#15 | TGC | chr18 | 31591779 | 31591802 | + | |
| gRNA-#16 | ATTA | chr18 | 31591758 | 31591784 | − | |
| gRNA-#17 | ATTO | chr18 | 31591755 | 31591781 | + | |
| gRNA-#18 | ATTC | chr18 | 31591764 | 31591790 | − | |
| gRNA-#19 | ATTC | chr18 | 31591890 | 31591916 | + | |
| gRNA-#20 | ATTG | chr18 | 31591755 | 31591781 | − | |
| gRNA-#21 | ATTG | chr18 | 31591808 | 31591834 | + | |
| gRNA-#22 | ATTT | chr18 | 31591738 | 31591764 | + | |
| gRNA-#23 | TGA | chr18 | 31591874 | 31591897 | − | |
| gRNA-#23 | TGA | chr18 | 31591874 | 31591897 | − | |
| gRNA-#23 | TGA | chr18 | 31591874 | 31591897 | − | |
| gRNA-#24 | TGA | chr18 | 31591789 | 31591812 | − | |
| gRNA-#24 | TGA | chr18 | 31591789 | 31591812 | − | |
| gRNA-#24 | TGA | chr18 | 31591789 | 31591812 | − | |
| gRNA-#25 | TGG | chr18 | 31591875 | 31591898 | + | |
| gRNA-#25 | TGG | chr18 | 31591875 | 31591898 | + | |
| gRNA-#25 | TGG | chr18 | 31591875 | 31591898 | + | |
| gRNA-#26 | TGC | chr18 | 31591897 | 31591920 | − | |
| gRNA-#26 | TGC | chr18 | 31591897 | 31591920 | − | |
| gRNA-#26 | TGC | chr18 | 31591897 | 31591920 | − | |
| gRNA-#27 | TGG | chr18 | 31591790 | 31591813 | + | |
| gRNA-#27 | TGG | chr18 | 31591790 | 31591813 | + | |
| gRNA-#27 | TGG | chr18 | 31591790 | 31591813 | + | |
| gRNA-#28 | TGC | chr18 | 31591898 | 31591921 | + | |
| gRNA-#28 | TGC | chr18 | 31591898 | 31591921 | + | |
| gRNA-#28 | TGC | chr18 | 31591898 | 31591921 | + | |
| gRNA-#29 | AGGGAT | chr18 | 31591793 | 31591820 | + | |
| gRNA-#29 | AGGGAT | chr18 | 31591793 | 31591820 | + | |
| gRNA-#30 | AGC | chr18 | 31591801 | 31591824 | + | |
| gRNA-#30 | AGC | chr18 | 31591801 | 31591824 | + | |
| gRNA-#30 | AGC | chr18 | 31591801 | 31591824 | + | |
| gRNA-#31 | GGC | chr18 | 31591884 | 31591907 | + | |
| gRNA-#31 | GGC | chr18 | 31591884 | 31591907 | + | |
| gRNA-#31 | GGC | chr18 | 31591884 | 31591907 | + | |
| gRNA-#32 | AGC | chr18 | 31591771 | 31591794 | + | |
| gRNA-#32 | AGC | chr18 | 31591771 | 31591794 | + | |
| gRNA-#32 | AGC | chr18 | 31591771 | 31591794 | + | |
| gRNA-#33 | CTTA | chr18 | 31591750 | 31591776 | − | |
| gRNA-#34 | TGC | chr18 | 31591800 | 31591823 | − | |
| gRNA-#34 | TGC | chr18 | 31591800 | 31591823 | − | |
| gRNA-#34 | TGC | chr18 | 31591800 | 31591823 | − | |
| gRNA-#35 | CTTA | chr18 | 31591797 | 31591823 | − | |
| gRNA-#36 | CTTA | chr18 | 31591752 | 31591778 | + | |
| gRNA-#37 | CTTC | chr18 | 31591816 | 31591842 | − | |
| gRNA-#38 | AGC | chr18 | 31591860 | 31591883 | − | |
| gRNA-#38 | AGC | chr18 | 31591860 | 31591883 | − | |
| gRNA-#38 | AGC | chr18 | 31591860 | 31591883 | − | |
| gRNA-#39 | CTTC | chr18 | 31591857 | 31591883 | − | |
| gRNA-#40 | CTTG | chr18 | 31591893 | 31591919 | + | |
| gRNA-#41 | CTTG | chr18 | 31591706 | 31591732 | − | |
| gRNA-#42 | CTTT | chr18 | 31591762 | 31591788 | + | |
| gRNA-#43 | CTTT | chr18 | 31591828 | 31591854 | − | |
| gRNA-#44 | AGG | chr18 | 31591838 | 31591861 | + | |
| gRNA-#44 | AGG | chr18 | 31591838 | 31591861 | + | |
| gRNA-#44 | AGG | chr18 | 31591838 | 31591861 | + | |
| gRNA-#45 | GGG | chr18 | 31591726 | 31591749 | + | |
| gRNA-#45 | GGG | chr18 | 31591726 | 31591749 | + | |
| gRNA-#45 | GGG | chr18 | 31591726 | 31591749 | + | |
| gRNA-#46 | GGG | chr18 | 31591843 | 31591866 | + | |
| gRNA-#46 | GGG | chr18 | 31591843 | 31591866 | + | |
| gRNA-#46 | GGG | chr18 | 31591843 | 31591866 | + | |
| gRNA-#47 | TGC | chr18 | 31591867 | 31591890 | − | |
| gRNA-#47 | TGC | chr18 | 31591867 | 31591890 | − | |
| gRNA-#47 | TGC | chr18 | 31591867 | 31591890 | − | |
| gRNA-#48 | GGC | chr18 | 31591853 | 31591876 | − | |
| gRNA-#48 | GGC | chr18 | 31591853 | 31591876 | − | |
| gRNA-#48 | GGC | chr18 | 31591853 | 31591876 | − | |
| gRNA-#48 | TGA | chr18 | 31591822 | 31591845 | + | |
| gRNA-#48 | TGA | chr18 | 31591822 | 31591845 | + | |
| gRNA-#48 | TGA | chr18 | 31591822 | 31591845 | + | |
| gRNA-#50 | TGA | chr18 | 31591804 | 31591827 | − | |
| gRNA-#50 | TGA | chr18 | 31591804 | 31591827 | − | |
| gRNA-#50 | TGA | chr18 | 31591804 | 31591827 | − | |
| gRNA-#51 | GGA | chr18 | 31591815 | 31591838 | + | |
| gRNA-#51 | GGA | chr18 | 31591815 | 31591838 | + | |
| gRNA-#51 | GGA | chr18 | 31591815 | 31591838 | + | |
| gRNA-#52 | GGG | chr18 | 31591795 | 31591818 | + | |
| gRNA-#52 | GGG | chr18 | 31591795 | 31591818 | + | |
| gRNA-#52 | GGG | chr18 | 31591795 | 31591818 | + | |
| gRNA-#53 | TGA | chr18 | 31591748 | 31591771 | + | |
| gRNA-#53 | TGA | chr18 | 31591748 | 31591771 | + | |
| gRNA-#53 | TGA | chr18 | 31591748 | 31591771 | + | |
| gRNA-#54 | GTTA | chr18 | 31591748 | 31591774 | + | |
| gRNA-#55 | GTTC | chr18 | 31591732 | 31591758 | + | |
| gRNA-#56 | GTTG | chr18 | 31591766 | 31591792 | + | |
| gRNA-#57 | GGA | chr18 | 31591796 | 31591819 | + | |
| gRNA-#57 | GGA | chr18 | 31591796 | 31591819 | + | |
| gRNA-#57 | GGA | chr18 | 31591796 | 31591819 | + | |
| gRNA-#58 | GTTT | chr18 | 31591796 | 31591822 | + | |
| gRNA-#59 | AGA | chr18 | 31591722 | 31591745 | − | |
| gRNA-#59 | AGA | chr18 | 31591722 | 31591745 | − | |
| gRNA-#59 | AGA | chr18 | 31591722 | 31591745 | − | |
| gRNA-#60 | GGC | chr18 | 31591825 | 31591848 | − | |
| gRNA-#60 | GGC | chr18 | 31591825 | 31591848 | − | |
| gRNA-#60 | GGC | chr18 | 31591825 | 31591848 | − | |
| gRNA-#61 | AGC | chr18 | 31591846 | 31591869 | + | |
| gRNA-#61 | AGC | chr18 | 31591846 | 31591869 | + | |
| gRNA-#61 | AGC | chr18 | 31591846 | 31591869 | + | |
| gRNA-#62 | TGC | chr18 | 31591822 | 31591845 | − | |
| gRNA-#62 | TGC | chr18 | 31591822 | 31591845 | − | |
| gRNA-#62 | TGC | chr18 | 31591822 | 31591845 | − | |
| gRNA-#63 | AGC | chr18 | 31591804 | 31591827 | + | |
| gRNA-#63 | AGC | chr18 | 31591804 | 31591827 | + | |
| gRNA-#63 | AGC | chr18 | 31591804 | 31591827 | + | |
| gRNA-#64 | AGC | chr18 | 31591832 | 31591855 | + | |
| gRNA-#64 | AGC | chr18 | 31591832 | 31591855 | + | |
| gRNA-#64 | AGC | chr18 | 31591832 | 31591855 | + | |
| gRNA-#65 | TCTGAT | chr18 | 31591782 | 31591809 | − | |
| gRNA-#65 | TCTGAT | chr18 | 31591782 | 31591809 | − | |
| gRNA-#66 | TGC | chr18 | 31591812 | 31591835 | − | |
| gRNA-#66 | TGC | chr18 | 31591812 | 31591835 | − | |
| gRNA-#66 | TGC | chr18 | 31591812 | 31591835 | − | |
| gRNA-#67 | TGC | chr18 | 31591792 | 31591815 | − | |
| gRNA-#67 | TGC | chr18 | 31591792 | 31591815 | − | |
| gRNA-#67 | TGC | chr18 | 31591792 | 31591815 | − | |
| gRNA-#68 | AGG | chr18 | 31591710 | 31591733 | + | |
| gRNA-#68 | AGG | chr18 | 31591710 | 31591733 | + | |
| gRNA-#68 | AGG | chr18 | 31591710 | 31591733 | + | |
| gRNA-#69 | TGG | chr18 | 31591856 | 31591879 | − | |
| gRNA-#69 | TGG | chr18 | 31591856 | 31591879 | − | |
| gRNA-#69 | TGG | chr18 | 31591856 | 31591879 | − | |
| gRNA-#70 | AGC | chr18 | 31591809 | 31591832 | + | |
| gRNA-#70 | AGC | chr18 | 31591809 | 31591832 | + | |
| gRNA-#70 | AGC | chr18 | 31591809 | 31591832 | + | |
| gRNA-#71 | AGC | chr18 | 31591830 | 31591853 | − | |
| gRNA-#71 | AGC | chr18 | 31591830 | 31591853 | − | |
| gRNA-#71 | AGC | chr18 | 31591830 | 31591853 | − | |

[0386] The spacer sequences in Table 2A corresponding to sgRNAs sgRNA_361, sgRNA_362, sgRNA_363, sgRNA_364, sgRNA_365, sgRNA_366, and sgRNA_367 can be used for targeting a base editor to alter a nucleobase of a splice site of the transthyretin polynucleotide. The spacer sequences in Table 2A corresponding to sgRNAs sgRNA_368, sgRNA_369, sgRNA_370, sgRNA_371, sgRNA_372, sgRNA_373, and sgRNA_374 can be used for targeting an endonuclease to a transthyretin (TTR) polynucleotide sequence. The three spacer sequences in Table 2A corresponding to sgRNA_375, sgRNA_376, and sgRNA_377 can be used to alter a nucleobase of a transthyretin (TTR) polynucleotide. The alteration of the nucleobase can result in an alteration of an isoleucine (I) to a valine (V) (e.g., to correct a V122I mutation in a transthyretin polypeptide encoded by the transthyretin polynucleotide). In embodiments, a transthyretin polynucleotide can be edited using the following combinations of base editors and sgRNA sequences (see Tables 1 and 2A): ABE8.8 and sgRNA_361; ABE8.8 and sgRNA_362; ABE8.8-VRQR and sgRNA_363; BE4-VRQR and sgRNA_363; BE4-VRQR and sgRNA_364; saABE8.8 and sgRNA_365; saBE4 and sgRNA_365; saBE4-KKH and sgRNA_366, ABE-bhCas12b and sgRNA_367; spCas9-ABE and sgRNA_375; spCas9-VRQR-ABE and sgRNA_376; or saCas9-ABE and sgRNA_377. The PAM sequence of spCas9-ABE can be AGG. The PAM sequence of spCas9-VRQR-ABE can be GGA. The PAM sequence of saCas9-ABE can be AGGAAT.

[0387] In certain embodiments, the fusion proteins provided herein comprise one or more features that improve the base editing activity of the fusion proteins. For example, any of the fusion proteins provided herein may comprise a Cas9 domain that has reduced nuclease activity. In some embodiments, any of the fusion proteins provided herein may have a Cas9 domain that does not have nuclease activity (dCas9), or a Cas9 domain that cuts one strand of a duplexed DNA molecule, referred to as a Cas9 nickase (nCas9). Without wishing to be bound by any particular theory, the presence of the catalytic residue (e.g., H₈₄₀) maintains the activity of the Cas9 to cleave the non-edited (e.g., non-methylated) strand opposite the targeted nucleobase. Mutation of the catalytic residue (e.g., D10 to A¹⁰) prevents cleavage of the edited strand containing the targeted A residue. Such Cas9 variants can generate a single-strand DNA break (nick) at a specific location based on the gRNA-defined target sequence, leading to repair of the non-edited strand, ultimately resulting in a nucleobase change on the non-edited strand.

### Nucleobase Editors

[0388] Useful in the methods and compositions described herein are nucleobase editors that edit, modify or alter a target nucleotide sequence of a polynucleotide. Nucleobase editors described herein typically include a polynucleotide programmable nucleotide binding domain and a nucleobase editing domain (e.g., adenosine deaminase, cytidine deaminase, or a dual deaminase). A polynucleotide programmable nucleotide binding domain, when in conjunction with a bound guide polynucleotide (e.g., gRNA), can specifically bind to a target polynucleotide sequence and thereby localize the base editor to the target nucleic acid sequence desired to be edited.

### Polynucleotide Programmable Nucleotide Binding Domain

[0389] Polynucleotide programmable nucleotide binding domains bind polynucleotides (e.g., RNA, DNA). A polynucleotide programmable nucleotide binding domain of a base editor can itself comprise one or more domains (e.g., one or more nuclease domains). In some embodiments, the nuclease domain of a polynucleotide programmable nucleotide binding domain comprises an endonuclease or an exonuclease.

[0390] Disclosed herein are base editors comprising a polynucleotide programmable nucleotide binding domain comprising all or a portion (e.g., a functional portion) of a CRISPR protein (i.e., a base editor comprising as a domain all or a portion (e.g., a functional portion) of a CRISPR protein (e.g., a Cas protein), also referred to as a “CRISPR protein-derived domain” of the base editor). A CRISPR protein-derived domain incorporated into a base editor can be modified compared to a wild-type or natural version of the CRISPR protein. A CRISPR protein-derived domain can comprise one or more mutations, insertions, deletions, rearrangements and/or recombinations relative to a wild-type or natural version of the CRISPR protein.

[0391] Cas proteins that can be used herein include class 1 and class 2. Non-limiting examples of Cas proteins include Cas1, Cas1B, Cas2, Cas3, Cas4, Cas5, Cas5d, Cas5t, Cas5h, Cas5a, Cas6, Cas7, Cas8, Cas9 (also known as Csn1 or Csx12), Cas10, Csy1, Csy2, Csy3, Csy4, Cse1, Cse2, Cse3, Cse4, Cse5e, Csc1, Csc2, Csa5, Csn1, Csn2, Csm1, Csm2, Csm3, Csm4, Csm5, Csm6, Cmr1, Cmr3, Cmr4, Cmr5, Cmr6, Csb1, Csb2, Csb3, Csx17, Csx14, Csx10, Csx16, CsaX, Csx3, Csx1, Csx1S, Csf1, Csf2, CsO, Csf4, Csd1, Csd2, Cst1, Cst2, Csh1, Csh2, Csa1, Csa2, Csa3, Csa4, Csa5, Cas12a/Cpf1, Cas12b/C₂cl (e.g., SEQ ID NO: 232), Cas12c/C₂c3, Cas12d/CasY, Cas12e/CasX, Cas12g, Cas12h, Cas12i, and Cas12j/CasΘ, CARF, DinG, homologues thereof, or modified versions thereof. A CRISPR enzyme can direct cleavage of one or both strands at a target sequence, such as within a target sequence and/or within a complement of a target sequence. For example, a CRISPR enzyme can direct cleavage of one or both strands within about 1, 2, 3, 4, 5, 6, 7, 8, 9, 10, 15, 20, 25, 50, 100, 200, 500, or more base pairs from the first or last nucleotide of a target sequence.

[0392] A vector that encodes a CRISPR enzyme that is mutated to with respect to a corresponding wild-type enzyme such that the mutated CRISPR enzyme lacks the ability to cleave one or both strands of a target polynucleotide containing a target sequence can be used. A Cas protein (e.g., Cas9, Cas12) or a Cas domain (e.g., Cas9, Cas12) can refer to a polypeptide or domain with at least or at least about 50%, 60%, 70%, 80%, 90%, 91%, 92%, 93%, 94%, 95%, 96%, 97%, 98%, 99%, or 100% sequence identity and/or sequence homology to a wild-type exemplary Cas polypeptide or Cas domain. Cas (e.g., Cas9, Cas12) can refer to the wild-type or a modified form of the Cas protein that can comprise an amino acid change such as a deletion, insertion, substitution, variant, mutation, fusion, chimera, or any combination thereof.

[0393] In some embodiments, a CRISPR protein-derived domain of a base editor can include all or a portion (e.g., a functional portion) of Cas9 from Corynebacterium ulcerans (NCBI Refs: NC_015683.1, NC_017317.1); Corynebacterium diphtheria (NCBI Refs: NC_016782.1, NC_016786.1); Spiroplasma syrphidicola (NCBI Ref: NC_021284.1); Prevotella intermedia (NCBI Ref: NC_017861.1); Spiroplasma taiwanense (NCBI Ref: NC_021846.1); Streptococcus iniae (NCBI Ref: NC_021314.1); Belliella baltica (NCBI Ref: NC_018010.1); Psychroflexus torquis (NCBI Ref: NC_018721.1); Streptococcus thermophilus (NCBI Ref: YP_820832.1); Listeria innocua (NCBI Ref: NP_472073.1); Campylobacter jejuni (NCBI Ref: YP_002344900.1); Neisseria meningitidis (NCBI Ref: YP_002342100.1), Streptococcus pyogenes, or Staphylococcus aureus.

[0394] Some aspects of the disclosure provide high fidelity Cas9 domains. High fidelity Cas9 domains are known in the art and described, for example, in Kleinstiver, B. P., et al. “High-fidelity CRISPR-Cas9 nucleases with no detectable genome-wide off-target effects.” Nature 529, 490-495 (2016); and Slaymaker, I. M., et al. “Rationally engineered Cas9 nucleases with improved specificity.” Science 351, 84-88 (2015); the entire contents of each of which are incorporated herein by reference. An Exemplary high fidelity Cas9 domain is provided in the Sequence Listing as SEQ ID NO: 233.

[0395] In some embodiments, any of the Cas9 fusion proteins or complexes provided herein comprise one or more of a D10A, N497X, a R661X, a Q695X, and/or a Q926X mutation, or a corresponding mutation in any of the amino acid sequences provided herein, wherein X is any amino acid.

[0396] Typically, Cas9 proteins, such as Cas9 from S. pyogenes (spCas9), require a “protospacer adjacent motif (PAM)” or PAM-like motif, which is a 2-6 base pair DNA sequence immediately following the DNA sequence targeted by the Cas9 nuclease in the CRISPR bacterial adaptive immune system. The presence of an NGG PAM sequence is required to bind a particular nucleic acid region, where the “N” in “NGG” is adenosine (A), thymidine (T), or cytosine (C), and the G is guanosine. In some embodiments, any of the fusion proteins or complexes provided herein may contain a Cas9 domain that is capable of binding a nucleotide sequence that does not contain a canonical (e.g., NGG) PAM sequence. Cas9 domains that bind to non-canonical PAM sequences have been described in the art and would be apparent to the skilled artisan. For example, Cas9 domains that bind non-canonical PAM sequences have been described in Kleinstiver, B. P., et al., “Engineered CRISPR-Cas9 nucleases with altered PAM specificities” Nature 523, 481-485 (2015); and Kleinstiver, B. P., et al., “Broadening the targeting range of Staphylococcus aureus CRISPR-Cas9 by modifying PAM recognition” Nature Biotechnology 33, 1293-1298 (2015); the entire contents of each are hereby incorporated by reference.

[0397] In some embodiments, the napDNAbp is a circular permutant (e.g., SEQ ID NO: 238).

[0398] In some embodiments, the polynucleotide programmable nucleotide binding domain comprises a nickase domain. Herein the term “nickase” refers to a polynucleotide programmable nucleotide binding domain comprising a nuclease domain that is capable of cleaving only one strand of the two strands in a duplexed nucleic acid molecule (e.g., DNA). For example, where a polynucleotide programmable nucleotide binding domain comprises a nickase domain derived from Cas9, the Cas9-derived nickase domain can include a D10A mutation and a histidine at position 840. In another example, a Cas9-derived nickase domain comprises an H840A mutation, while the amino acid residue at position 10 remains a D.

[0399] In some embodiments, a Cas9 nuclease has an inactive (e.g., an inactivated) DNA cleavage domain, that is, the Cas9 is a nickase, referred to as an “nCas9” protein (for “nickase” Cas9; SEQ ID NO: 201). The Cas9 nickase may be a Cas9 protein that is capable of cleaving only one strand of a duplexed nucleic acid molecule (e.g., a duplexed DNA molecule). In some embodiments the Cas9 nickase comprises an amino acid sequence that is at least 60%, at least 65%, at least 70%, at least 75%, at least 80%, at least 85%, at least 90%, at least 95%, at least 96%, at least 97%, at least 98%, at least 99%, or at least 99.5% identical to any one of the Cas9 nickases provided herein. Additional suitable Cas9 nickases will be apparent to those of skill in the art based on this disclosure and knowledge in the field and are within the scope of this disclosure.

[0400] Also provided herein are base editors comprising a polynucleotide programmable nucleotide binding domain which is catalytically dead (i.e., incapable of cleaving a target polynucleotide sequence). For example, in the case of a base editor comprising a Cas9 domain, the Cas9 can comprise both a D10A mutation and an H840A mutation. In further embodiments, a catalytically dead polynucleotide programmable nucleotide binding domain comprises a point mutation (e.g., D10A or H840A) as well as a deletion of all or a portion (e.g., a functional portion) of a nuclease domain. dCas9 domains are known in the art and described, for example, in Qi et al., “Repurposing CRISPR as an RNA-guided platform for sequence-specific control of gene expression.” Cell. 2013; 152 (5): 1173-83, the entire contents of which are incorporated herein by reference.

[0401] The term “protospacer adjacent motif (PAM)” or PAM-like motif refers to a 2-6 base pair DNA sequence immediately following the DNA sequence targeted by a nucleic acid programmable DNA binding protein. In some embodiments, the PAM can be a 5′ PAM (i.e., located upstream of the 5′ end of the protospacer). In other embodiments, the PAM can be a 3′ PAM (i.e., located downstream of the 5′ end of the protospacer). The PAM sequence can be any PAM sequence known in the art. Suitable PAM sequences include, but are not limited to, NGG, NGA, NGC, NGN, NGT, NGTT, NGCG, NGAG, NGAN, NGNG, NGCN, NGCG, NGTN, NNGRRT, NNNRRT, NNGRR (N), TTTV, TYCV, TYCV, TATV, NNNNGATT, NNAGAAW, or NAAAAC. Y is a pyrimidine; N is any nucleotide base; W is A or T.

[0402] A base editor provided herein can comprise a CRISPR protein-derived domain that is capable of binding a nucleotide sequence that contains a canonical or non-canonical protospacer adjacent motif (PAM) sequence.

[0403] In some embodiments, the PAM is an “NRN” PAM where the “N” in “NRN” is adenine (A), thymine (T), guanine (G), or cytosine (C), and the R is adenine (A) or guanine (G); or the PAM is an “NYN” PAM, wherein the “N” in NYN is adenine (A), thymine (T), guanine (G), or cytosine (C), and the Y is cytidine (C) or thymine (T), for example, as described in R.T. Walton et al., 2020, Science, 10.1126/science.aba8853 (2020), the entire contents of which are incorporated herein by reference.

[0404] Several PAM variants are described in Table 3 below.

TABLE 3
Cas9 proteins and corresponding PAM sequences.
N is A, C, T, or G; and Vis A, C, or G.

| Variant | PAM |
|---|---|
| spCas9 | NGG |
| spCas9-VRQR | NGA |
| spCas9-VRER | NGCG |
| xCas9 (sp) | NGN |
| saCas9 | NNGRRT |
| saCas9-KKH | NNNRRT |
| spCas9-MQKSER | NGCG |
| spCas9-MQKSER | NGCN |
| spCas9-LRKIQK | NGTN |
| spCas9-LRVSQK | NGTN |
| spCas9-LRVSQL | NGTN |
| spCas9-MQKFRAER | NGC |
| Cpf1 | 5′ (TTTV) |
| SpyMac | 5′-NAA-3′ |

[0405] In some embodiments, the PAM is NGC. In some embodiments, the NGC PAM is recognized by a Cas9 variant. In some embodiments, the NGC PAM Cas9 variant includes one or more amino acid substitutions selected from D1135M, S1136Q, G1218K, E1219F, A1322R, D1332A, R1335E, and T1337R (collectively termed “MQKFRAER”) of spCas9 (SEQ ID No: 197), or a corresponding mutation in another Cas9. In some embodiments, the Cas9 variant contains one or more amino acid substitutions selected from D1135V, G1218R, R1335Q, and T1337R (collectively termed VRQR) of spCas9 (SEQ ID No: 197), or a corresponding mutation in another Cas9. In some embodiments, the Cas9 variant contains one or more amino acid substitutions selected from D1135V, G1218R, R1335E, and T1337R (collectively termed VRER) of spCas9 (SEQ ID No: 197), or a corresponding mutation in another Cas9. In some embodiments, the Cas9 variant contains one or more amino acid substitutions selected from E782K, N968K, and R1015H (collectively termed KHH) of saCas9 (SEQ ID NO: 218). In some embodiments, the Cas9 variant includes one or more amino acid substitutions selected from D1135M, S1136Q, G1218K, E1219S, R1335E, and T1337R (collectively termed “MQKSER”) of spCas9 (SEQ ID No: 197), or a corresponding mutation in another Cas9. In some embodiments, the Cas9 variant includes one or more amino acid substitutions selected from D1135M, S1136Q, G1218K, E1219S, R1335E, and T1337R (collectively termed “MQKSER”) of spCas9 (SEQ ID No: 197), or a corresponding mutation in another Cas9.

[0406] In some embodiments, a CRISPR protein-derived domain of a base editor comprises all or a portion (e.g., a functional portion) of a Cas9 protein with a canonical PAM sequence (NGG). In other embodiments, a Cas9-derived domain of a base editor can employ a non-canonical PAM sequence. Such sequences have been described in the art and would be apparent to the skilled artisan. For example, Cas9 domains that bind non-canonical PAM sequences have been described in Kleinstiver, B. P., et al., “Engineered CRISPR-Cas9 nucleases with altered PAM specificities” Nature 523, 481-485 (2015); and Kleinstiver, B. P., et al., “Broadening the targeting range of Staphylococcus aureus CRISPR-Cas9 by modifying PAM recognition” Nature Biotechnology 33, 1293-1298 (2015); R. T. Walton et al. “Unconstrained genome targeting with near-PAMless engineered CRISPR-Cas9 variants” Science 10.1126/science.aba8853 (2020); Hu et al. “Evolved Cas9 variants with broad PAM compatibility and high DNA specificity,” Nature, 2018 Apr. 5, 556 (7699), 57-63; Miller et al., “Continuous evolution of SpCas9 variants compatible with non-G PAMs” Nat. Biotechnol., 2020 April;38 (4): 471-481; the entire contents of each are hereby incorporated by reference.

Fusion Proteins or Complexes Comprising a NapDNAbp and a Cytidine Deaminase and/or Adenosine Deaminase

[0407] Some aspects of the disclosure provide fusion proteins or complexes comprising a Cas9 domain or other nucleic acid programmable DNA binding protein (e.g., Cas12) and one or more cytidine deaminase, adenosine deaminase, or cytidine adenosine deaminase domains. It should be appreciated that the Cas9 domain may be any of the Cas9 domains or Cas9 proteins (e.g., dCas9 or nCas9) provided herein. In some embodiments, any of the Cas9 domains or Cas9 proteins (e.g., dCas9 or nCas9) provided herein may be fused with any of the cytidine deaminases and/or adenosine deaminases provided herein. The domains of the base editors disclosed herein can be arranged in any order.

[0408] In some embodiments, the fusion proteins or complexes comprising a cytidine deaminase or adenosine deaminase and a napDNAbp (e.g., Cas9 or Cas12 domain) do not include a linker sequence. In some embodiments, a linker is present between the cytidine or adenosine deaminase and the napDNAbp. In some embodiments, cytidine or adenosine deaminase and the napDNAbp are fused via any of the linkers provided herein. For example, in some embodiments the cytidine or adenosine deaminase and the napDNAbp are fused via any of the linkers provided herein.

[0409] It should be appreciated that the fusion proteins or complexes of the present disclosure may comprise one or more additional features. For example, in some embodiments, the fusion protein or complex may comprise inhibitors, cytoplasmic localization sequences, export sequences, such as nuclear export sequences, or other localization sequences, as well as sequence tags that are useful for solubilization, purification, or detection of the fusion proteins or complexes. Suitable protein tags provided herein include, but are not limited to, biotin carboxylase carrier protein (BCCP) tags, myc-tags, calmodulin-tags, FLAG-tags, hemagglutinin (HA)-tags, polyhistidine tags, also referred to as histidine tags or His-tags, maltose binding protein (MBP)-tags, nus-tags, glutathione-S-transferase (GST)-tags, green fluorescent protein (GFP)-tags, thioredoxin-tags, S-tags, Softags (e.g., Softag 1, Softag 3), strep-tags, biotin ligase tags, FLASH tags, V5 tags, and SBP-tags. Additional suitable sequences will be apparent to those of skill in the art. In some embodiments, the fusion protein or complex comprises one or more His tags.

[0410] Exemplary, yet nonlimiting, fusion proteins are described in International PCT Application Nos. PCT/US2017/045381, PCT/US2019/044935, and PCT/US2020/016288, each of which is incorporated herein by reference for its entirety.

Fusion Proteins or Complexes with Internal Insertions

[0411] Provided herein are fusion proteins or complexes comprising a heterologous polypeptide fused to a nucleic acid programmable nucleic acid binding protein, for example, a napDNAbp. The heterologous polypeptide can be fused to the napDNAbp at a C-terminal end of the napDNAbp, an N-terminal end of the napDNAbp, or inserted at an internal location of the napDNAbp. In some embodiments, the heterologous polypeptide is a deaminase (e.g., cytidine or adenosine deaminase) or a functional fragment thereof. For example, a fusion protein can comprise a deaminase flanked by an N-terminal fragment and a C-terminal fragment of a Cas9 or Cas12 (e.g., Cas12b/C₂cl), polypeptide.

[0412] The deaminase can be a circular permutant deaminase. In some embodiments, the deaminase is a circular permutant TadA, circularly permutated at amino acid residue 116, 136, or 65 as numbered in a TadA reference sequence.

[0413] The fusion protein or complexes can comprise more than one deaminase. The fusion protein or complex can comprise, for example, 1, 2, 3, 4, 5 or more deaminases. The deaminases in a fusion protein or complex can be adenosine deaminases, cytidine deaminases, or a combination thereof.

[0414] In some embodiments, the napDNAbp in the fusion protein or complex contains a Cas9 polypeptide or a fragment thereof. The Cas9 polypeptide can be a variant Cas9 polypeptide. The Cas9 polypeptide can be a circularly permuted Cas9 protein.

[0415] The heterologous polypeptide (e.g., deaminase) can be inserted in the napDNAbp (e.g., Cas9 or Cas12 (e.g., Cas12b/C2c1)) at a suitable location, for example, such that the napDNAbp retains its ability to bind the target polynucleotide and a guide nucleic acid. A deaminase (e.g., adenosine deaminase, cytidine deaminase, or adenosine deaminase and cytidine deaminase (dual deaminase)) can be inserted into a napDNAbp without compromising function of the deaminase (e.g., base editing activity) or the napDNAbp (e.g., ability to bind to target nucleic acid and guide nucleic acid).

[0416] In some embodiments, the deaminase (e.g., adenosine deaminase, cytidine deaminase, or adenosine deaminase and cytidine deaminase) is inserted in regions of the Cas9 polypeptide comprising higher than average B-factors (e.g., higher B factors compared to the total protein or the protein domain comprising the disordered region). Cas9 polypeptide positions comprising a higher than average B-factor can include, for example, residues 768, 792, 1052, 1015, 1022, 1026, 1029, 1067, 1040, 1054, 1068, 1246, 1247, and 1248 as numbered in the above Cas9 reference sequence. Cas9 polypeptide regions comprising a higher than average B-factor can include, for example, residues 792-872, 792-906, and 2-791 as numbered in the above Cas9 reference sequence.

[0417] In some embodiments, a heterologous polypeptide (e.g., deaminase) is inserted in a flexible loop of a Cas9 polypeptide. The flexible loop portions can be selected from the group consisting of 530-537, 569-570, 686-691, 943-947, 1002-1025, 1052-1077, 1232-1247, or 1298-1300 as numbered in the above Cas9 reference sequence, or a corresponding amino acid residue in another Cas9 polypeptide. The flexible loop portions can be selected from the group consisting of: 1-529, 538-568, 580-685, 692-942, 948-1001, 1026-1051, 1078-1231, or 1248-1297 as numbered in the above Cas9 reference sequence, or a corresponding amino acid residue in another Cas9 polypeptide.

[0418] A heterologous polypeptide (e.g., adenine deaminase) can be inserted into a Cas9 polypeptide region corresponding to amino acid residues: 1017-1069, 1242-1247, 1052-1056, 1060-1077, 1002-1003, 943-947, 530-537, 568-579, 686-691, 1242-1247, 1298-1300, 1066-1077, 1052-1056, or 1060-1077 as numbered in the above Cas9 reference sequence, or a corresponding amino acid residue in another Cas9 polypeptide.

[0419] A heterologous polypeptide (e.g., adenine deaminase) can be inserted in place of a deleted region of a Cas9 polypeptide. The deleted region can correspond to an N-terminal or C-terminal portion of the Cas9 polypeptide. Exemplary internal fusions base editors are provided in Table 4A below:

TABLE 4A
Insertion loci in Cas9 proteins

| BE ID | Modification | Other ID |
|---|---|---|
| IBE001 | Cas9 TadA ins 1015 | ISLAY01 |
| IBE002 | Cas9 TadA ins 1022 | ISLAY02 |
| IBE003 | Cas9 TadA ins 1029 | ISLAY03 |
| IBE004 | Cas9 TadA ins 1040 | ISLAY04 |
| IBE005 | Cas9 TadA ins 1068 | ISLAY05 |
| IBE006 | Cas9 TadA ins 1247 | ISLAY06 |
| IBE007 | Cas9 TadA ins 1054 | ISLAY07 |
| IBE008 | Cas9 TadA ins 1026 | ISLAY08 |
| IBE009 | Cas9 TadA ins 768 | ISLAY09 |
| IBE020 | delta HNH TadA 792 | ISLAY20 |
| IBE021 | N-term fusion single TadA helix truncated 165-end | ISLAY21 |
| IBE029 | TadA-Circular Permutant116 ins1067 | ISLAY29 |
| IBE031 | TadA- Circular Permutant 136 ins1248 | ISLAY31 |
| IBE032 | TadA- Circular Permutant 136ins 1052 | ISLAY32 |
| IBE035 | delta 792-872 TadA ins | ISLAY35 |
| IBE036 | delta 792-906 TadA ins | ISLAY36 |
| IBE043 | TadA-Circular Permutant 65 ins1246 | ISLAY43 |
| IBE044 | TadA ins C-term truncate2 791 | ISLAY44 |

[0420] A heterologous polypeptide (e.g., deaminase) can be inserted within a structural or functional domain of a Cas9 polypeptide. A heterologous polypeptide (e.g., deaminase) can be inserted between two structural or functional domains of a Cas9 polypeptide. A heterologous polypeptide (e.g., deaminase) can be inserted in place of a structural or functional domain of a Cas9 polypeptide, for example, after deleting the domain from the Cas9 polypeptide. The structural or functional domains of a Cas9 polypeptide can include, for example, RuvC I, RuvC II, RuvC III, Rec1, Rec2, PI, or HNH.

[0421] A fusion protein can comprise a linker between the deaminase and the napDNAbp polypeptide. The linker can be a peptide or a non-peptide linker. For example, the linker can be an XTEN, (GGGS) n (SEQ ID NO: 246), SGGSSGGS(SEQ ID NO: 330), (GGGGS) n (SEQ ID NO: 247), (G) n, (EAAAK) n (SEQ ID NO: 248), (GGS) n, SGSETPGTSESATPES(SEQ ID NO: 249). In some embodiments, the fusion protein comprises a linker between the N-terminal Cas9 fragment and the deaminase. In some embodiments, the fusion protein comprises a linker between the C-terminal Cas9 fragment and the deaminase. In some embodiments, the N-terminal and C-terminal fragments of napDNAbp are connected to the deaminase with a linker. In some embodiments, the N-terminal and C-terminal fragments are joined to the deaminase domain without a linker. In some embodiments, the fusion protein comprises a linker between the N-terminal Cas9 fragment and the deaminase but does not comprise a linker between the C-terminal Cas9 fragment and the deaminase. In some embodiments, the fusion protein comprises a linker between the C-terminal Cas9 fragment and the deaminase but does not comprise a linker between the N-terminal Cas9 fragment and the deaminase.

[0422] In some embodiments, the napDNAbp in the fusion protein or complex is a Cas12 polypeptide, e.g., Cas12b/C2c1, or a functional fragment thereof capable of associating with a nucleic acid (e.g., a gRNA) that guides the Cas 12 to a specific nucleic acid sequence. The Cas12 polypeptide can be a variant Cas 12 polypeptide. In other embodiments, the N- or C-terminal fragments of the Cas 12 polypeptide comprise a nucleic acid programmable DNA binding domain or a RuvC domain. In other embodiments, the fusion protein contains a linker between the Cas12 polypeptide and the catalytic domain. In other embodiments, the amino acid sequence of the linker is GGSGGS(SEQ ID NO: 250) or GSSGSETPGTSESATPESSG (SEQ ID NO: 251). In other embodiments, the linker is a rigid linker. In other embodiments of the above aspects, the linker is encoded by GGAGGCTCTGGAGGAAGC(SEQ ID NO: 252) or GGCTCTTCTGGATCTGAAACACCTGGCACAAGCGAGAGCGCCACCCCTGAGAGCTCTGGC (SEQ ID NO: 253).

[0423] In other embodiments, the fusion protein or complex contains a nuclear localization signal (e.g., a bipartite nuclear localization signal). In other embodiments, the amino acid sequence of the nuclear localization signal is MAPKKKRKVGIHGVPAA (SEQ ID NO: 261). In other embodiments of the above aspects, the nuclear localization signal is encoded by the following sequence:

[0424] ATGGCCCCAAAGAAGAAGCGGAAGGTCGGTATCCACGGAGTCCCAGCAGCC(SEQ ID NO: 262). In other embodiments, the Cas12b polypeptide contains a mutation that silences the catalytic activity of a RuvC domain. In other embodiments, the Cas12b polypeptide contains D574A, D829A and/or D952A mutations.

[0425] In some embodiments, the fusion protein or complex comprises a napDNAbp domain (e.g., Cas12-derived domain) with an internally fused nucleobase editing domain (e.g., all or a portion (e.g., a functional portion) of a deaminase domain, e.g., an adenosine deaminase domain). In some embodiments, the napDNAbp is a Cas12b. In some embodiments, the base editor comprises a BhCas12b domain with an internally fused TadA*8 domain inserted at the loci provided in Table 4B below.

TABLE 4B
Insertion loci in Cas12b proteins

| | Insertion | Inserted |
|---|---|---|
| | site | between aa |
| BhCas12b | | |
| position 1 | 153 | PS |
| position 2 | 255 | KE |
| position 3 | 306 | DE |
| position 4 | 980 | DG |
| position 5 | 1019 | KL |
| position 6 | 534 | FP |
| position 7 | 604 | KG |
| position 8 | 344 | HF |
| BvCas12b | | |
| position 1 | 147 | PD |
| position 2 | 248 | GG |
| position 3 | 299 | PE |
| position 4 | 991 | GE |
| position 5 | 1031 | KM |
| AaCas12b | | |
| position 1 | 157 | PG |
| position 2 | 258 | VG |
| position 3 | 310 | DP |
| position 4 | 1008 | GE |
| position 5 | 1044 | GK |

[0426] In some embodiments, the base editing system described herein is an ABE with TadA inserted into a Cas9. Polypeptide sequences of relevant ABEs with TadA inserted into a Cas9 are provided in the attached Sequence Listing as SEQ ID NOs: 263-308.

[0427] Exemplary, yet nonlimiting, fusion proteins are described in International PCT Application Nos. PCT/US2020/016285 and U.S. Provisional Application Nos. 62/852,228 and 62/852,224, the contents of which are incorporated by reference herein in their entireties.

### A to G Editing

[0428] In some embodiments, a base editor described herein comprises an adenosine deaminase domain. Such an adenosine deaminase domain of a base editor can facilitate the editing of an adenine (A) nucleobase to a guanine (G) nucleobase by deaminating the A to form inosine (I), which exhibits base pairing properties of G. In some embodiments, an A-to-G base editor further comprises an inhibitor of inosine base excision repair, for example, a uracil glycosylase inhibitor (UGI) domain or a catalytically inactive inosine specific nuclease. Without wishing to be bound by any particular theory, the UGI domain or catalytically inactive inosine specific nuclease can inhibit or prevent base excision repair of a deaminated adenosine residue (e.g., inosine), which can improve the activity or efficiency of the base editor.

[0429] A base editor comprising an adenosine deaminase can act on any polynucleotide, including DNA, RNA and DNA-RNA hybrids. In an embodiment an adenosine deaminase domain of a base editor comprises all or a portion (e.g., a functional portion) of an ADAT comprising one or more mutations which permit the ADAT to deaminate a target A in DNA. For example, the base editor can comprise all or a portion (e.g., a functional portion) of an ADAT from Escherichia coli (EcTadA) comprising one or more of the following mutations: D108N, A¹⁰⁶V, D147Y, E155V, L⁸⁴F, H123Y, 1156F, or a corresponding mutation in another adenosine deaminase. Exemplary ADAT homolog polypeptide sequences are provided in the Sequence Listing as SEQ ID NOs: 1 and 309-315.

[0430] The adenosine deaminase can be derived from any suitable organism (e.g., E. coli). In some embodiments, the adenosine deaminase is from Escherichia coli, Staphylococcus aureus, Salmonella typhi, Shewanella putrefaciens, Haemophilus influenzae, Caulobacter crescentus, or Bacillus subtilis. In some embodiments, the adenine deaminase is a naturally-occurring adenosine deaminase that includes one or more mutations corresponding to any of the mutations provided herein (e.g., mutations in ecTadA). The corresponding residue in any homologous protein can be identified by e.g., sequence alignment and determination of homologous residues. The mutations in any naturally-occurring adenosine deaminase (e.g., having homology to ecTadA) that correspond to any of the mutations described herein (e.g., any of the mutations identified in ecTadA) can be generated accordingly.

[0431] In some embodiments, the adenosine deaminase comprises an amino acid sequence that is at least 60%, at least 65%, at least 70%, at least 75%, at least 80%, at least 85%, at least 90%, at least 95%, at least 96%, at least 97%, at least 98%, at least 99%, or at least 99.5% identical to any one of the amino acid sequences set forth in any of the adenosine deaminases provided herein. It should be appreciated that adenosine deaminases provided herein may include one or more mutations (e.g., any of the mutations provided herein). The disclosure provides any deaminase domains with a certain percent identify plus any of the mutations or combinations thereof described herein. In some embodiments, the adenosine deaminase comprises an amino acid sequence that has 1, 2, 3, 4, 5, 6, 7, 8, 9, 10, 11, 12, 13, 14, 15, 16, 17, 18, 19, 20, 21, 22, 21, 24, 25, 26, 27, 28, 29, 30, 31, 32, 33, 34, 35, 36, 37, 38, 39, 40, 41, 42, 43, 44, 45, 46, 47, 48, 49, 50, or more mutations compared to a reference sequence, or any of the adenosine deaminases provided herein.

[0432] It should be appreciated that any of the mutations provided herein (e.g., based on a TadA reference sequence, such as TadA*7.10 (SEQ ID NO: 1)) can be introduced into other adenosine deaminases, such as E. coli TadA (ecTadA), S. aureus TadA (saTadA), or other adenosine deaminases (e.g., bacterial adenosine deaminases). In some embodiments, the TadA reference sequence is TadA*7.10 (SEQ ID NO: 1). It would be apparent to the skilled artisan that additional deaminases may similarly be aligned to identify homologous amino acid residues that can be mutated as provided herein. Thus, any of the mutations identified in a TadA reference sequence can be made in other adenosine deaminases (e.g., ecTada) that have homologous amino acid residues. It should also be appreciated that any of the mutations provided herein can be made individually or in any combination in a TadA reference sequence or another adenosine deaminase.

[0433] In some embodiments, the adenosine deaminase comprises an alteration or set of alterations selected from those listed in Tables 5A-5E below:

TABLE 5A
Adenosine Deaminase Variants. Residue positions in the E. coli TadA variant
(TadA*) are indicated.

| | 23 | 26 | 36 | 37 | 48 | 49 | 51 | 72 | 84 | 87 | 106 | 108 | 123 | 125 | 142 | 146 | 147 | 152 | 155 | 156 | 157 | 161 |
|---|---|---|---|---|---|---|---|---|---|---|---|---|---|---|---|---|---|---|---|---|---|---|
| TadA*0.1 | W | R | H | N | P | | R | N | L | S | A | D | H | G | A | S | D | R | E | I | K | K |
| TadA*0.2 | W | R | H | N | P | | R | N | L | S | A | D | H | G | A | S | D | R | E | I | K | K |
| TadA*1.1 | W | R | H | N | P | | R | N | L | S | A | N | H | G | A | S | D | R | E | I | K | K |
| TadA*1.2 | W | R | H | N | P | | R | N | L | S | V | N | H | G | A | S | D | R | E | I | K | K |
| TadA*2.1 | W | R | H | N | P | | R | N | L | S | V | N | H | G | A | S | Y | R | V | I | K | K |
| TadA*2.2 | W | R | H | N | P | | R | N | L | S | V | N | H | G | A | S | Y | R | V | I | K | K |
| TadA*2.3 | W | R | H | N | P | | R | N | L | S | V | N | H | G | A | S | Y | R | V | I | K | K |
| TadA*2.4 | W | R | H | N | P | | R | N | L | S | V | N | H | G | A | S | Y | R | V | I | K | K |
| TadA*2.5 | W | R | H | N | P | | R | N | L | S | V | N | H | G | A | S | Y | R | V | I | K | K |
| TadA*2.6 | W | R | H | N | P | | R | N | L | S | V | N | H | G | A | S | Y | R | V | I | K | K |
| TadA*2.7 | W | R | H | N | P | | R | N | L | S | V | N | H | G | A | S | Y | R | V | I | K | K |
| TadA*2.8 | W | R | H | N | P | | R | N | L | S | V | N | H | G | A | S | Y | R | V | I | K | K |
| TadA*2.9 | W | R | H | N | P | | R | N | L | S | V | N | H | G | A | S | Y | R | V | I | K | K |
| TadA*2.10 | W | R | H | N | P | | R | N | L | S | V | N | H | G | A | S | Y | R | V | I | K | K |
| TadA*2.11 | W | R | H | N | P | | R | N | L | S | V | N | H | G | A | S | Y | R | V | I | K | K |
| TadA*2.12 | W | R | H | N | P | | R | N | L | S | V | N | H | G | A | S | Y | R | V | I | K | K |
| TadA*3.1 | W | R | H | N | P | | R | N | F | S | V | N | Y | G | A | S | Y | R | V | F | K | K |
| TadA*3.2 | W | R | H | N | P | | R | N | F | S | V | N | Y | G | A | S | Y | R | V | F | K | K |
| TadA*3.3 | W | R | H | N | P | | R | N | F | S | V | N | Y | G | A | S | Y | R | V | F | K | K |
| TadA*3.4 | W | R | H | N | P | | R | N | F | S | V | N | Y | G | A | S | Y | R | V | F | K | K |
| TadA*3.5 | W | R | H | N | P | | R | N | F | S | V | N | Y | G | A | S | Y | R | V | F | K | K |
| TadA*3.6 | W | R | H | N | P | | R | N | F | S | V | N | Y | G | A | S | Y | R | V | F | K | K |
| TadA*3.7 | W | R | H | N | P | | R | N | F | S | V | N | Y | G | A | S | Y | R | V | F | K | K |
| TadA*3.8 | W | R | H | N | P | | R | N | F | S | V | N | Y | G | A | S | Y | R | V | F | K | K |
| TadA*4.1 | W | R | H | N | P | | R | N | L | S | V | N | H | G | N | S | Y | R | V | I | K | K |
| TadA*4.2 | W | G | H | N | P | | R | N | L | S | V | N | H | G | N | S | Y | R | V | I | K | K |
| TadA*4.3 | W | R | H | N | P | | R | N | F | S | V | N | Y | G | N | S | Y | R | V | F | K | K |
| TadA*5.1 | W | R | L | N | P | | L | N | F | S | V | N | Y | G | A | C | Y | R | V | F | N | K |
| TadA*5.2 | W | R | H | S | P | | R | N | F | S | V | N | Y | G | A | S | Y | R | V | F | K | T |
| TadA*5.3 | W | R | L | N | P | | L | N | I | S | V | N | Y | G | A | C | Y | R | V | F | N | K |
| TadA*5.4 | W | R | H | S | P | | R | N | F | S | V | N | Y | G | A | S | Y | R | V | F | K | T |
| TadA*5.5 | W | R | L | N | P | | L | N | F | S | V | N | Y | G | A | C | Y | R | V | F | N | K |
| TadA*5.6 | W | R | L | N | P | | L | N | F | S | V | N | Y | G | A | C | Y | R | V | F | N | K |
| TadA*5.7 | W | R | L | N | P | | L | N | F | S | V | N | Y | G | A | C | Y | R | V | F | N | K |
| TadA*5.8 | W | R | L | N | P | | L | N | F | S | V | N | Y | G | A | C | Y | R | V | F | N | K |
| TadA*5.9 | W | R | L | N | P | | L | N | F | S | V | N | Y | G | A | C | Y | R | V | F | N | K |
| TadA*5.10 | W | R | L | N | P | | L | N | F | S | V | N | Y | G | A | C | Y | R | V | F | N | K |
| TadA*5.11 | W | R | L | N | P | | L | N | F | S | V | N | Y | G | A | C | Y | R | V | F | N | K |
| TadA*5.12 | W | R | L | N | P | | L | N | F | S | V | N | Y | G | A | C | Y | R | V | F | N | K |
| TadA*5.13 | W | R | H | N | P | | L | D | F | S | V | N | Y | A | A | S | Y | R | V | F | K | K |
| TadA*5.14 | W | R | H | N | S | | L | N | F | C | V | N | Y | G | A | S | Y | R | V | F | K | K |
| TadA*6.1 | W | R | H | N | S | | L | N | F | S | V | N | Y | G | N | S | Y | R | V | F | K | K |
| TadA*6.2 | W | R | H | N | T | V | L | N | F | S | V | N | Y | G | N | S | Y | R | V | F | N | K |
| TadA*6.3 | W | R | L | N | S | | L | N | F | S | V | N | Y | G | A | C | Y | R | V | F | N | K |
| TadA*6.4 | W | R | L | N | S | | L | N | F | S | V | N | Y | G | N | C | Y | R | V | F | N | K |
| TadA*6.5 | W | R | L | N | T | V | L | N | F | S | V | N | Y | G | A | C | Y | R | V | F | N | K |
| TadA*6.6 | W | R | L | N | T | V | L | N | F | S | V | N | Y | G | N | C | Y | R | V | F | N | K |
| TadA*7.1 | W | R | L | N | A | | L | N | F | S | V | N | Y | G | A | C | Y | R | V | F | N | K |
| TadA*7.2 | W | R | L | N | A | | L | N | F | S | V | N | Y | G | N | C | Y | R | V | F | N | K |
| TadA*7.3 | L | R | L | N | A | | L | N | F | S | V | N | Y | G | A | C | Y | R | V | F | N | K |
| TadA*7.4 | R | R | L | N | A | | L | N | F | S | V | N | Y | G | A | C | Y | R | V | F | N | K |
| TadA*7.5 | W | R | L | N | A | | L | N | F | S | V | N | Y | G | A | C | Y | H | V | F | N | K |
| TadA*7.6 | W | R | L | N | A | | L | N | I | S | V | N | Y | G | A | C | Y | P | V | F | N | K |
| TadA*7.7 | L | R | L | N | A | | L | N | F | S | V | N | Y | G | A | C | Y | P | V | F | N | K |
| TadA*7.8 | L | R | L | N | A | | L | N | F | S | V | N | Y | G | N | C | Y | R | V | F | N | K |
| TadA*7.9 | L | R | L | N | A | | L | N | F | S | V | N | Y | G | N | C | Y | P | V | F | N | K |
| TadA*7.10 | R | R | L | N | A | | L | N | F | S | V | N | Y | G | A | C | Y | P | V | F | N | K |

TABLE 5B
TadA*8 Adenosine Deaminase Variants. Residue positions in the E. coli TadA
variant (TadA*) are indicated. Alterations are referenced to TadA*7.10 (first row).

| | 23 | 63 | 84 | 51 | 76 | 82 | 84 | 106 | 108 | 123 | 146 | 147 | 152 | 154 | 155 | 156 | 157 | 166 |
|---|---|---|---|---|---|---|---|---|---|---|---|---|---|---|---|---|---|---|
| TadA*7.10 | R | L | A | L | I | V | F | V | N | Y | C | Y | P | Q | V | F | N | T |
| TadA*8.1 | | | | | | | | | | | | T | | | | | | |
| TadA*8.2 | | | | | | | | | | | | R | | | | | | |
| TadA*8.3 | | | | | | | | | | | | | | S | | | | |
| TadA*8.4 | | | | | | | | | | H | | | | | | | | |
| TadA*8.5 | | | | | | S | | | | | | | | | | | | |
| TadA*8.6 | | | | | | | | | | | | | | | | | | R |
| TadA*8.7 | | | | | | | | | | | | | | R | | | | |
| TadA*8.8 | | | | | | | | | | H | | R | | R | | | | |
| TadA*8.9 | | | | | Y | | | | | | | R | | R | | | | |
| TadA*8.10 | | | | | | | | | | | | R | | R | | | | R |
| TadA*8.11 | | | | | | | | | | | | T | | R | | | | |
| TadA*8.12 | | | | | | | | | | | | T | | S | | | | |
| TadA*7.10 | R | L | A | L | I | V | F | V | N | Y | C | Y | P | Q | V | F | N | T |
| TadA*8.13 | | | | | Y | | | | | H | | R | | R | | | | |
| TadA*8.14 | | | | | Y | S | | | | | | | | | | | | |
| TadA*8.15 | | | | | | S | | | | | | R | | | | | | |
| TadA*8.16 | | | | | | S | | | | H | | R | | | | | | |
| TadA*8.17 | | | | | | S | | | | | | | | R | | | | |
| TadA*8.18 | | | | | | S | | | | H | | | | R | | | | |
| TadA*8.19 | | | | | | S | | | | H | | R | | R | | | | |
| TadA*8.20 | | | | | Y | S | | | | H | | R | | R | | | | |
| TadA*8.21 | | | | | | | | | | | | R | | S | | | | |
| TadA*8.22 | | | | | | S | | | | | | | | S | | | | |
| TadA*8.23 | | | | | | S | | | | H | | | | | | | | |
| TadA*8.24 | | | | | | S | | | | H | | T | | | | | | |

TABLE 5C
TadA*9 Adenosine Deaminase Variants. Alterations are referenced
to TadA*7.10. Additional details of TadA*9 adenosine
deaminases are described in International PCT Application
No. PCT/US2020/049975, which is incorporated herein by
reference in its entirety for all purposes.

| TadA*9 | |
|---|---|
| Description | Alterations |
| TadA*9.1 | E25F, V82S, Y123H, T133K, Y147R, Q154R |
| TadA*9.2 | E25F, V82S, Y123H, Y147R, Q154R |
| TadA*9.3 | V82S, Y123H, P124W, Y147R, Q154R |
| TadA*9.4 | L51W, V82S, Y123H, C146R, Y147R, Q154R |
| TadA*9.5 | P54C, V82S, Y123H, Y147R, Q154R |
| TadA*9.6 | Y73S, V82S, Y123H, Y147R, Q154R |
| TadA*9.7 | N38G, V82T, Y123H, Y147R, Q154R |
| TadA*9.8 | R23H, V82S, Y123H, Y147R, Q154R |
| TadA*9.9 | R21N, V82S, Y123H, Y147R, Q154R |
| TadA*9.10 | V82S, Y123H, Y147R, Q154R, A158K |
| TadA*9.11 | N72K, V82S, Y123H, D139L, Y147R, Q154R, |
| TadA*9.12 | E25F, V82S, Y123H, D139M, Y147R, Q154R |
| TadA*9.13 | M70V, V82S, M94V, Y123H, Y147R, Q154R |
| TadA*9.14 | Q71M, V82S, Y123H, Y147R, Q154R |
| TadA*9.15 | E25F, V82S, Y123H, T133K, Y147R, Q154R |
| TadA*9.16 | E25F, V82S, Y123H, Y147R, Q154R |
| TadA*9.17 | V82S, Y123H, P124W, Y147R, Q154R |
| TadA*9.18 | L51W, V82S, Y123H, C146R, Y147R, Q154R |
| TadA*9.19 | P54C, V82S, Y123H, Y147R, Q154R |
| TadA*9.2 | Y73S, V82S, Y123H, Y147R, Q154R |
| TadA*9.21 | N38G, V82T, Y123H, Y147R, Q154R |
| TadA*9.22 | R23H, V82S, Y123H, Y147R, Q154R |
| TadA*9.23 | R21N, V82S, Y123H, Y147R, Q154R |
| TadA*9.24 | V82S, Y123H, Y147R, Q154R, A158K |
| TadA*9.25 | N72K, V82S, Y123H, D139L, Y147R, Q154R, |
| TadA*9.26 | E25F, V82S, Y123H, D139M, Y147R, Q154R |
| TadA*9.27 | M70V, V82S, M94V, Y123H, Y147R, Q154R |
| TadA*9.28 | Q71M, V82S, Y123H, Y147R, Q154R |
| TadA*9.29 | E25F_I76Y_V82S_Y123H_Y147R_Q154R |
| TadA*9.30 | I76Y_V82T_Y123H_Y147R_Q154R |
| TadA*9.31 | N38G_I76Y_V82S_Y123H_Y147R_Q154R |
| TadA*9.32 | N38G_I76Y_V82T_Y123H_Y147R_Q154R |
| TadA*9.33 | R23H_I76Y_V82S_Y123H_Y147R_Q154R |
| TadA*9.34 | P54C_I76Y_V82S_Y123H_Y147R_Q154R |
| TadA*9.35 | R21N_I76Y_V82S_Y123H_Y147R_Q154R |
| TadA*9.36 | I76Y_V82S_Y123H_D138M_Y147R_Q154R |
| TadA*9.37 | Y72S_I76Y_V82S_Y123H_Y147R_Q154R |
| TadA*9.38 | E25F_I76Y_V82S_Y123H_Y147R_Q154R |
| TadA*9.39 | I76Y_V82T_Y123H_Y147R_Q154R |
| TadA*9.40 | N38G_I76Y_V82S_Y123H_Y147R_Q154R |
| TadA*9.41 | N38G_I76Y_V82T_Y123H_Y147R_Q154R |
| TadA*9.42 | R23H_I76Y_V82S_Y123H_Y147R_Q154R |
| TadA*9.43 | P54C_I76Y_V82S_Y123H_Y147R_Q154R |
| TadA*9.44 | R21N_I76Y_V82S_Y123H_Y147R_Q154R |
| TadA*9.45 | I76Y_V82S_Y123H_D138M_Y147R_Q154R |
| TadA*9.46 | Y72S_I76Y_V82S_Y123H_Y147R_Q154R |
| TadA*9.47 | N72K_V82S, Y123H, Y147R, Q154R |
| TadA*9.48 | Q71M_V82S, Y123H, Y147R, Q154R |
| TadA*9.49 | M70V, V82S, M94V, Y123H, Y147R, Q154R |
| TadA*9.50 | V82S, Y123H, T133K, Y147R, Q154R |
| TadA*9.51 | V82S, Y123H, T133K, Y147R, Q154R, A158K |
| TadA*9.52 | M70V, Q71M, N72K, V82S, Y123H, Y147R, Q154R |
| TadA*9.53 | N72K_V82S, Y123H, Y147R, Q154R |
| TadA*9.54 | Q71M_V82S, Y123H, Y147R, Q154R |
| TadA*9.55 | M70V, V82S, M94V, Y123H, Y147R, Q154R |
| TadA*9.56 | V82S, Y123H, T133K, Y147R, Q154R |
| TadA*9.57 | V82S, Y123H, T133K, Y147R, Q154R, A158K |
| TadA*9.58 | M70V, Q71M, N72K, V82S, Y123H, Y147R, Q154R |

[0434] In some embodiments, the adenosine deaminase comprises a TadA*8.20 adenosine deaminase variant further comprising an F149Y amino acid alteration. In some embodiments, the adenosine deaminase comprises a TadA*8.20 adenosine deaminase variant further comprising the amino acid alterations R147D, F149Y, T166I, and D167N(TadA*8.10+). In some embodiments, the adenosine deaminase comprises a TadA*8.20 adenosine deaminase variant further comprising the amino acid alterations S82T and F149Y (TadA*9v1). In some embodiments, the adenosine deaminase comprises a TadA*8.20 adenosine deaminase variant further comprising the amino acid alterations Y147D, F149Y, T166I, D167N and S82T (TadA*9v2).

[0435] In some embodiments, the adenosine deaminase comprises one or more of MII, MIS, S2A, S2E, S2H, S2R, S2L, E3L, V4D, V4E, V4M, V4K, V4S, V4T, V4A, E5K, F6S, F6G, F6H, F6Y, F6I, F6E, S7K, H8E, H8Y, H8H, H8Q, H8E, H8G, H8S, E9Y, E9K, E9V, E9E, Y10F, Y10W, Y10Y, M12S, M12L, M12R, M12W, R13H, R13I, R13Y, R13R, R13G, R13S, H14N, A15D, A15V, A15L, A15H, T17T, T17A, T17W, T17L, T17F, T17R, T17S, L18A, L18E, L18N, L18L, L18S, A19N, A19H, A19K, A19A, A19D, A19G, A19M, R2IN, K20K, K20A, K20R, K20E, K20G, K20C, K20Q R21A, R21R, R21N, R21Y, R21C G22P, A22W, A22R, W23D, R23H, W23G, W23Q, W23L, W23R, W23H W23D W23M, W23W, W23I, D24E, D24G, D24W, D24D, D24R, E25F, E25M, E25D, E25A, E25G, E25R, E25E, E25H E25V, E25S, E25Y, R26D, R26E, R26G, R26N, R26Q, R26C, R26L, R26K, R26W, R26C, R26P, R26R, R26A, R26H, E27E, E27Q, E27H, E27C, E27G, E27K, E27S, E27P, E27R, E27L, E27V, E27D, V28V, V28A, V28C, V28G, V28P, V28S, V28T, P29V, P29P, P29A, P29G, P29K, P29L, V30V, V30I, V30L, V30F, V30G, V30A, V30M, L34S, L34V, L34L, L34M, L34W, L34G, H36E, H36V, L36H, H36L, H36N, N37N, N37H, N37R, N37T, N37S, N38G, N38R, N38N, N38E, V40I, W45A, W45W, W45R, W45L, W45N, N46N, N46M, N46P, N46G, N46L, N46R, N46V, R46W, R46F, R46Q, R46M, R47A, R47Q, R47F, R47K, R47P, R47W, R47M, R47R, R47G, R47S, R47V, R47H, P48T, P48L, P48A, P48I, P48S, P48R, P48K, P48D, P48E, P48H, P48G, P48P, P48N, 149G, 149H, 149V, I49F, 149H, 491, 149M, 149N, 149K, 149Q, 149T, G50L, G50S, G50R, G50G, R51H, R51L, R51N, L51W, R51Y, R51G, R51V, R51R, H52D, H52Y, H521, H52H, D53D, D53E, D53G, D53P, P54C, P54T, P54P, P54E, A55H, T55A, T55I, T55V, T55G, T55T, A56A, A56H, A56W, A56E, A56S, H57P, H57A, H57H, H57N, A58G, A58E, A58A, A58R, E59A, E59G, E59I, E59Q, E59W, E59E, E59T, E59H, E59P, M61A, M61I, M61L, M61V, M61P, M61G, M61I, L63S, L63V, L63T, L63R, L63H, L63A, R64A, R64Q, R64R, R64D, Q65V, Q65H, Q65G, Q65P, Q65F, Q65Q, Q65R, G66V, G66E, G66T, G66G, G66C, G67G, G67W, G67I, G67A, G67D, G67L, G67V, L68Q, L68M, L68V, L68H, L68L, L68G,V69A, V69M, V69V, M70V, M70L, E70A, M70A, M70M, M70E, M70T, M70v, Q71M, Q7IN, Q71L, Q71R, Q71Q, Q71I, N72A, N72K, N72S, N72D, N72Y, N72N, N72H, N72G, N72M, Y73G, Y73I, Y73K, Y73R, Y73S, Y73Y, Y73H, Y73A, R74A, R74Q, R74G, R74K, R74L, R74N, R74G, R74K, R74R, I76H, I76R, 176W, 176Y, 176V, 176Q, I76L, 176D, 176F, 176I, 176N, I76T, I76Y, D77G, D77D, D77A, D77Q, A78Y, A78T, A78G, A78A, A78I, T79M, T79R, T79L, T79T, L80M, L80Y, L80I, L80V, L80L, Y81D, Y81V, Y81Y, Y81M, V82A, V82S, V82G, V82T, V82V, V82Q, V82Y, T83L, T83F, T83T, T83N, L84E, L84F, L84Y, L84I, L84L, L84M, L84A, L84T, L84S, E85K, E85G, E85P, E85S, E85E, E85F, E85V, E85R, P86T, P86C, P86P, P86L, P86N, P86K, P86H, C87M, C87I, C87S, C87N, C87P, S87C, S87L, S87V, V88A, V88M, V88V, V88T, V88E, V88D, V88S, C90S, C90P, C90A, C90T, C90M, A91A, A91G, A91S, A91V, A91T, A91C, A91L, G92T, G92M, G92A, G92Y, G92G, A93I, A93C, A93M, A93V, A93A, M94M, M94T, M94A, M94V, M94L, M94I, M94H, 195S, 195G, 195L, 195H, 195V, H96A, H96L, H96R, H96S, H96H, H96N, H96E, S97C, S97G, S97I, S97M, S97R, S97S, S97P, R98K, R981, R98N, R98Q, R98G, R98H, R98C, R98L, R98R, G100R, G100V, G100K, G100A, G100S, G100M, G100I, R101V, R101R, R101S, R101C, V102A, V102F, V102I, V102V, D103A, V103A, V103G, V103F, V103V, F104G, D104N, F104V, F104I, F104L, F104A, F104F, F104R, G105V, G105W, G105G, G105M, G105A, A106T, V106Q, V106F, V106W, V106M, A106A, A106Q, A106F, A106G, A106W, A106M, A106V, A106R, A106L, A106S, A106B, A106I, R107C, R107G, R107P, R107K, R107A, R107N, R107W, R107H, R107S, R107R, R107F, D108N, D108F, D108G, D108V, D108A, D108Y, D108H, D108I, D108K, D108L, D108M, D108Q, N108Q, N108F, N108W, N108M, N108K, D108K, D108F, D108M, D108Q, D108R, D108W, D108S, D108E, D108T, D108R, D108D, A109H, A109K, A109R, A109S, A109T, A109V, A109A, A109D, K110G, K110H, K110I, K110R, K110T, K110K, K110A, K1101, T111A, T111G, T111H, T111R, T111T, T111K, G112A, G112G, G112H, G112T, G112R, A113N, A114G, A114H, A114V, A114C, A114S, A114A, G115S, G115G, G115M, G115L, G115A, G115F, L117M, L117L, L117W, L117A, L117S, L117N, L117V, M118D, M118G, M118K, M118N, M118V, M118M, M118L, M118R, D119L, D119N, D119S, D119V, D119D, V120H, V120L, V120V, V120T, V120A, V120E, V120G, V120D, L121D, L121M, L12IN, L121K, L121L, H122H, H122N, H122P, H122R, H122S, H122Y, H122G, H122T, H122L, H123C, H123G, H123P, H123V, H123Y, Y123H, H123Y, H123H, P124P, P124H, P124A, P124Y, P124D, P124G, P124I, P124L, P124W, G125H, G125I, G125A, G125M, G125K, G125G, G125P, M126D, M126H, M126K, M126I, M126N, M1260, M126S, M126Y, M126M, M126G, N127H, N127S, N127D, N127K, N127R, N127N, N127I, N127P, N127M, H128R, H128N, H128L, H128H, R129H, R129Q, R129V, R129I, R129E, R129V, R129R, R129M, R129P, V130R, V130V, V130E, V130D, E131E, E131I, E131V, E131K, I1321, 1132F, I132T, 1132L, 1132V, 1132E, T133V, T133E, T133G, T133K, T133T, T133A, T133H, T133F, T133I, E134A, E134E, E134G, E134I, E134H, E134K, E134T, G135G, G135V, G135I, G135P, G135E, 1136G, 1136L, 1136T, 11361, 1137A, 1137D, 1137E, L137M, I137S, L137L, L1371, A138D, A138E, A138G, S138A, A138N, A138S, A138T, A138V, A138Y, A138A, A138M, A138L, D139E, D139I, D139C, D139L, D139M, D139D, D139G, D139H, D139A, E140A, E140C, E140L, E140R, E140K, E140E, E140D, C141S, C141A, C141C, C141V, C141E, A142N, A142D, A142G, A142A, A142L, A142S, A142T, A142N, A142S, A142V, A142E, A142C, A143D, A143E, A143G, A143D, A143G, A143E, A143L, A143W, A143M, A143S, A143Q, A143R, A143A, A143I, L144S, L144L, L144T, L144A, L145A, L145F, L145G, L145D, L145L, L145C, L145E, L145s, C146R, S146A, S146C, S146D, S146F, S146R, S146T, S146D, S146G, S146S, S146L, D147D, D147L, D147F, D147G, D147Y, Y147T, Y147R, Y147D, D147R, D147Y, D147A, D147T, D147H, D147F, D147U, D147V, D1471, D147C, F148L, F148F, F148R, F148Y, F148A, F148T, F149C, F149M, F149R, F149Y, F149N, F149F, F149A, F149T, F149V R150R, R150M, R150D, R150F, M151F, M151P, M151R, M151V, M151M, M151E, R152C, R152F, R152H, R152P, R152R, R152P, R152Q, R152M, R1520, R153C, R153Q, R153R, R153V, R153E, R153A, R153P, Q154E, Q154H, Q154M, Q154R, Q154L, Q154S, Q154V, Q154Q, Q154F, Q154I, Q154A, Q154K, E155F, E155G, E155I, E155K, E155P, E155V, E155D, E155E, E155L, E155Q, I156V, 1156A, 1156I, 1156L, 1156F, 1156D, 1156K, 1156N, 1156R, 1156Y, E157A, E157F, E157I, E157P, E157T, E157V, N157K, K157N, K157V, K157P, K157I, K157F, K157F, K157T, K157A, K157S, K157R, A158Q, A158K, A158V, A158A, A158D, A158S, A158T, A158N, Q159S, Q159Q, Q159A, Q159F, Q159K, Q159L, Q159N, K160A, K160S, K160E, K160K, K160N, K160F, K160Q, K161T, K161K, K161R, K161I, K161A, K16IN, K161Q, K161S, K161T, A162D, A162Q, R162H, R162P, A162S, A162A, A162N, A162M, A162K, Q163G, Q163S, Q163Q, Q163A, Q163H, Q163N, Q163R, S164F, S164S, S164Q, S164I, S164R, S164Y, S165S, S165P, S165Q, S165A, S165D, S165I, S165T, S165Y, T166T, T166Q, T166E, T166S, T166D, T166K, T166I, T166N, T166P, T166R, D167S D167D, D1671, D167G, D167T, D167A and/or D167N mutation in a TadA reference sequence (e.g., TadA*7.10,ecTadA, or TadA8e), and any alternative mutation at the corresponding position, or one or more corresponding mutations in another adenosine deaminase. Additional mutations are described in U.S. Patent Application Publication No. 2022/0307003 A1 U.S. Pat. No. 11,155,803, and International Patent Application Publications No. WO 2023/288304 A2, PCT/CN2022/143408, WO 2018/027078 A1, WO 2021/158921 A1 and WO 2023/034959 A2, the disclosures of which are incorporated herein by reference in their entirety for all purposes.

[0436] In embodiments, a variant of TadA*7.10 comprises one or more alterations selected from any of those alterations provided herein.

[0437] In particular embodiments, an adenosine deaminase heterodimer comprises a TadA*8 domain and an adenosine deaminase domain selected from Staphylococcus aureus (S. aureus) TadA, Bacillus subtilis (B. subtilis) TadA, Salmonella typhimurium (S. typhimurium) TadA, Shewanella putrefaciens (S. putrefaciens) TadA, Haemophilus influenzae F3031 (H. influenzae) TadA, Caulobacter crescentus (C. crescentus) TadA, Geobacter sulfurreducens (G. sulfurreducens) TadA, or TadA*7.10.

[0438] In some embodiments, the TadA*8 is a variant as shown in Table 5D. Table 5D shows certain amino acid position numbers in the TadA amino acid sequence and the amino acids present in those positions in the TadA-7.10 adenosine deaminase. Table 5D also shows amino acid changes in TadA variants relative to TadA-7.10 following phage-assisted non-continuous evolution (PANCE) and phage-assisted continuous evolution (PACE), as described in M. Richter et al., 2020, Nature Biotechnology, doi.org/10.1038/s41587-020-0453-z, the entire contents of which are incorporated by reference herein. In some embodiments, the TadA*8 is TadA*8a, TadA*8b, TadA*8c, TadA*8d, or TadA*8e. In some embodiments, the TadA*8 is TadA*8e. In one embodiment, an adenosine deaminase is a TadA*8 that comprises or consists essentially of SEQ ID NO: 316 or a fragment thereof having adenosine deaminase activity.

TABLE 5D
Select TadA*8 Variants

| | | TadA amino acid number | | | | | | | | | |
|---|---|---|---|---|---|---|---|---|---|---|---|
| | TadA | 26 | 88 | 109 | 111 | 119 | 122 | 147 | 149 | 166 | 167 |
| | TadA- | R | V | A | T | D | H | Y | F | T | D |
| | 7.10 | | | | | | | | | | |
| PANCE 1 | | | | | R | | | | | | |
| PANCE 2 | | | | S/T | R | | | | | | |
| PACE | TadA-8a | C | | S | R | N | N | D | Y | I | N |
| | TadA-8b | | A | S | R | N | N | | Y | I | N |
| | TadA-8c | C | | S | R | N | N | | Y | I | N |
| | TadA-8d | | A | | R | N | | | Y | | |
| | TadA-8e | | | S | R | N | N | D | Y | I | N |

[0439] In some embodiments, the TadA variant is a variant as shown in Table 5E. Table 5E shows certain amino acid position numbers in the TadA amino acid sequence and the amino acids present in those positions in the TadA*7.10 adenosine deaminase. In some embodiments, the TadA variant is MSP605, MSP680, MSP823, MSP824, MSP825, MSP827, MSP828, or MSP829. In some embodiments, the TadA variant is MSP828. In some embodiments, the TadA variant is MSP829.

TABLE 5E
TadA Variants

| | TadA Amino Acid Number | | | | | | | |
|---|---|---|---|---|---|---|---|---|
| Variant | 36 | 76 | 82 | 147 | 149 | 154 | 157 | 167 |
| TadA-7.10 | L | I | V | Y | F | Q | N | D |
| MSP605 | | | G | T | | S | | |
| MSP680 | | Y | G | T | | S | | |
| MSP823 | H | | G | T | | S | K | |
| MSP824 | | | G | D | Y | S | | N |
| MSP825 | H | | G | D | Y | S | K | N |
| MSP827 | H | Y | G | T | | S | K | |
| MSP828 | | Y | G | D | Y | S | | N |
| MSP829 | H | Y | G | D | Y | S | K | N |

[0440] In particular embodiments, the fusion proteins or complexes comprise a single (e.g., provided as a monomer) TadA*(e.g., TadA*8 or TadA*9). Throughout the present disclosure, an adenosine deaminase base editor that comprises a single TadA*domain is indicates using the terminology ABEm or ABE #m, where “#” is an identifying number (e.g., ABE8.20m), where “m” indicates “monomer.” In some embodiments, the TadA*is linked to a Cas9 nickase. In some embodiments, the fusion proteins or complexes of the disclosure comprise as a heterodimer of a wild-type TadA (TadA (wt)) linked to a TadA*. Throughout the present disclosure, an adenosine deaminase base editor that comprises a single TadA* domain and a TadA (wt) domain is indicates using the terminology ABEd or ABE #d, where “#” is an identifying number (e.g., ABE8.20d), where “d” indicates “dimer.” In other embodiments, the fusion proteins or complexes of the disclosure comprise as a heterodimer of a TadA*7.10 linked to a TadA*. In some embodiments, the base editor is ABE8 comprising a TadA*variant monomer. In some embodiments, the base editor is ABE comprising a heterodimer of a TadA*and a TadA (wt). In some embodiments, the base editor is ABE comprising a heterodimer of a TadA*and TadA*7.10. In some embodiments, the base editor is ABE comprising a heterodimer of a TadA*. In some embodiments, the TadA* is selected from Tables 5A-5E.

[0441] In some embodiments, the adenosine deaminase is expressed as a monomer. In other embodiments, the adenosine deaminase is expressed as a heterodimer. In some embodiments, the deaminase or other polypeptide sequence lacks a methionine, for example when included as a component of a fusion protein. This can alter the numbering of positions. However, the skilled person will understand that such corresponding mutations refer to the same mutation.

[0442] Any of the mutations provided herein and any additional mutations (e.g., based on the ecTadA amino acid sequence) can be introduced into any other adenosine deaminases. Any of the mutations provided herein can be made individually or in any combination in a TadA reference sequence or another adenosine deaminase (e.g., ecTadA).

[0443] Details of A to G nucleobase editing proteins are described in International PCT Application No. PCT/US2017/045381 (WO2018/027078) and Gaudelli, N.M., et al., “Programmable base editing of A.T to G.C in genomic DNA without DNA cleavage” Nature, 551, 464-471 (2017), the entire contents of which are hereby incorporated by reference.

### C to T Editing

[0444] In some embodiments, a base editor disclosed herein comprises a fusion protein or complex comprising cytidine deaminase capable of deaminating a target cytidine (C) base of a polynucleotide to produce uridine (U), which has the base pairing properties of thymine. In some embodiments, for example where the polynucleotide is double-stranded (e.g., DNA), the uridine base can then be substituted with a thymidine base (e.g., by cellular repair machinery) to give rise to a C: G to a T: A transition. In other embodiments, deamination of a C to U in a nucleic acid by a base editor cannot be accompanied by substitution of the U to a T.

[0445] The deamination of a target C in a polynucleotide to give rise to a U is a non-limiting example of a type of base editing that can be executed by a base editor described herein. In another example, a base editor comprising a cytidine deaminase domain can mediate conversion of a cytosine (C) base to a guanine (G) base. For example, a U of a polynucleotide produced by deamination of a cytidine by a cytidine deaminase domain of a base editor can be excised from the polynucleotide by a base excision repair mechanism (e.g., by a uracil DNA glycosylase (UDG) domain), producing an abasic site. The nucleobase opposite the abasic site can then be substituted (e.g., by base repair machinery) with another base, such as a C, by for example a translesion polymerase. Although it is typical for a nucleobase opposite an abasic site to be replaced with a C, other substitutions (e.g., A, G or T) can also occur.

[0446] Accordingly, in some embodiments a base editor described herein comprises a deamination domain (e.g., cytidine deaminase domain) capable of deaminating a target C to a U in a polynucleotide. Further, as described below, the base editor can comprise additional domains which facilitate conversion of the U resulting from deamination to, in some embodiments, a T or a G. For example, a base editor comprising a cytidine deaminase domain can further comprise a uracil glycosylase inhibitor (UGI) domain to mediate substitution of a U by a T, completing a C-to-T base editing event. In another example, the base editor can comprise a uracil stabilizing protein as described herein. In another example, a base editor can incorporate a translesion polymerase to improve the efficiency of C-to-G base editing, since a translesion polymerase can facilitate incorporation of a C opposite an abasic site (i.e., resulting in incorporation of a G at the abasic site, completing the C-to-G base editing event).

[0447] A base editor comprising a cytidine deaminase as a domain can deaminate a target C in any polynucleotide, including DNA, RNA and DNA-RNA hybrids.

[0448] In some embodiments, a cytidine deaminase of a base editor comprises all or a portion (e.g., a functional portion) of an apolipoprotein B mRNA editing complex (APOBEC) family deaminase. APOBEC is a family of evolutionarily conserved cytidine deaminases. Members of this family are C-to-U editing enzymes. The N-terminal domain of APOBEC like proteins is the catalytic domain, while the C-terminal domain is a pseudocatalytic domain. More specifically, the catalytic domain is a zinc dependent cytidine deaminase domain and is important for cytidine deamination. APOBEC family members include APOBEC1, APOBEC2, APOBEC3A, APOBEC3B, APOBEC3C, APOBEC3D (“APOBEC3E” now refers to this), APOBEC3F, APOBEC3G, APOBEC3H, APOBEC4, and Activation-induced (cytidine) deaminase.

[0449] Other exemplary deaminases that can be fused to Cas9 according to aspects of this disclosure are provided below. In embodiments, the deaminases are activation-induced deaminases (AID). It should be understood that, in some embodiments, the active domain of the respective sequence can be used, e.g., the domain without a localizing signal (nuclear localization sequence, without nuclear export signal, cytoplasmic localizing signal).

[0450] Some aspects of the present disclosure are based on the recognition that modulating the deaminase domain catalytic activity of any of the fusion proteins or complexes described herein, for example by making point mutations in the deaminase domain, affect the processivity of the fusion proteins (e.g., base editors) or complexes. For example, mutations that reduce, but do not eliminate, the catalytic activity of a deaminase domain within a base editing fusion protein or complexes can make it less likely that the deaminase domain will catalyze the deamination of a residue adjacent to a target residue, thereby narrowing the deamination window. The ability to narrow the deamination window can prevent unwanted deamination of residues adjacent to specific target residues, which can reduce or prevent off-target effects.

[0451] In some embodiments, an APOBEC deaminase incorporated into a base editor can comprise one or more mutations selected from the group consisting of H121R, H122R, R126A, R126E, R118A, W90A, W90Y, and R132E of rAPOBEC1; D316R, D317R, R320A, R320E, R313A, W285A, W285Y, and R326E of hAPOBEC3G; and any alternative mutation at the corresponding position, or one or more corresponding mutations in another APOBEC deaminase.

[0452] A number of modified cytidine deaminases are commercially available, including, but not limited to, SaBE3, SaKKH-BE3, VQR-BE3, EQR-BE3, VRER-BE3, YE1-BE3, EE-BE3, YE2-BE3, and YEE-BE3, which are available from Addgene (plasmids 85169, 85170, 85171, 85172, 85173, 85174, 85175, 85176, 85177). In some embodiments, a deaminase incorporated into a base editor comprises all or a portion (e.g., a functional portion) of an APOBEC1 deaminase.

[0453] In some embodiments, the fusion proteins or complexes of the disclosure comprise one or more cytidine deaminase domains. In some embodiments, the cytidine deaminases provided herein are capable of deaminating cytosine or 5-methylcytosine to uracil or thymine. In some embodiments, the cytidine deaminases provided herein are capable of deaminating cytosine in DNA. The cytidine deaminase may be derived from any suitable organism. In some embodiments, the cytidine deaminase is a naturally-occurring cytidine deaminase that includes one or more mutations corresponding to any of the mutations provided herein. One of skill in the art will be able to identify the corresponding residue in any homologous protein, e.g., by sequence alignment and determination of homologous residues. Accordingly, one of skill in the art would be able to generate mutations in any naturally-occurring cytidine deaminase that corresponds to any of the mutations described herein. In some embodiments, the cytidine deaminase is from a prokaryote. In some embodiments, the cytidine deaminase is from a bacterium. In some embodiments, the cytidine deaminase is from a mammal (e.g., human).

[0454] In some embodiments, the cytidine deaminase comprises an amino acid sequence that is at least 60%, at least 65%, at least 70%, at least 75%, at least 80%, at least 85%, at least 90%, at least 95%, at least 96%, at least 97%, at least 98%, at least 99%, or at least 99.5% identical to any one of the cytidine deaminase amino acid sequences set forth herein. It should be appreciated that cytidine deaminases provided herein may include one or more mutations (e.g., any of the mutations provided herein). Some embodiments provide a polynucleotide molecule encoding the cytidine deaminase nucleobase editor polypeptide of any previous aspect or as delineated herein. In some embodiments, the polynucleotide is codon optimized.

[0455] In embodiments, a fusion protein of the disclosure comprises two or more nucleic acid editing domains.

[0456] Details of C to T nucleobase editing proteins are described in International PCT Application No. PCT/US2016/058344 (WO2017/070632) and Komor, A. C., et al., “Programmable editing of a target base in genomic DNA without double-stranded DNA cleavage” Nature 533, 420-424 (2016), the entire contents of which are hereby incorporated by reference.

### Cytidine Adenosine Base Editors (CABEs)

[0457] In some embodiments, a base editor described herein comprises an adenosine deaminase variant that has increased cytidine deaminase activity. Such base editors may be referred to as “cytidine adenosine base editors (CABEs)” or “cytosine base editors derived from TadA*(CBE-Ts),” and their corresponding deaminase domains may be referred to as “TadA*acting on DNA cytosine (TADC)” domains. In some instances, an adenosine deaminase variant has both adenine and cytosine deaminase activity (i.e., is a dual deaminase). In some embodiments, the adenosine deaminase variants deaminate adenine and cytosine in DNA. In some embodiments, the adenosine deaminase variants deaminate adenine and cytosine in single-stranded DNA. In some embodiments, the adenosine deaminase variants deaminate adenine and cytosine in RNA. In some embodiments, the adenosine deaminase variant predominantly deaminates cytosine in DNA and/or RNA (e.g., greater than 30%, 40%, 50%, 60%, 70%, 80%, 90%, 95%, or 99% of all deaminations catalyzed by the adenosine deaminase variant, or the number of cytosine deaminations catalyzed by the variant is about or at least about 2-fold, 3-fold, 4-fold, 5-fold, 6-fold, 7-fold, 8-fold, 9-fold, 10-fold, 25-fold, 50-fold, 75-fold, 100-fold, 500-fold, or 1,000-fold greater than the number adenine deaminations catalyzed by the variant). In some embodiments, the adenosine deaminase variant has approximately equal cytosine and adenosine deaminase activity (e.g., the two activities are within about 10% or 20% of each other). In some embodiments, the adenosine deaminase variant has predominantly cytosine deaminase activity, and little, if any, adenosine deaminase activity. In some embodiments, the adenosine deaminase variant has cytosine deaminase activity, and no significant or no detectable adenosine deaminase activity. In some embodiments, the target polynucleotide is present in a cell in vitro or in vivo. In some embodiments, the cell is a bacteria, yeast, fungi, insect, plant, or mammalian cell.

[0458] In some embodiments, the CABE comprises a bacterial TadA deaminase variant (e.g., ecTadA). In some embodiments, the CABE comprises a truncated TadA deaminase variant. In some embodiments, the CABE comprises a fragment of a TadA deaminase variant. In some embodiments, the CABE comprises a TadA*8.20 variant.

[0459] In some embodiments, an adenosine deaminase variant of the disclosure is a TadA adenosine deaminase comprising one or more alterations that increase cytosine deaminase activity (e.g., at least about 10-fold, 20-fold, 30-fold, 40-fold, 50-fold, 60-fold, 70-fold or more increase) while maintaining adenosine deaminase activity (e.g., at least about 30%, 40%, 50% or more of the activity of a reference adenosine deaminase (e.g., TadA*8.20 or TadA*8.19)). In some instances, the adenosine deaminase variant comprises one or more alterations that increase cytosine deaminase activity (e.g., at least about 10-fold, 20-fold, 30-fold, 40-fold, 50-fold, 60-fold, 70-fold or more increase) relative to the activity of a reference adenosine deaminase and comprise undetectable adenosine deaminase activity or adenosine deaminase activity that is less than 30%, 20%, 10%, or 5% of that of a reference adenosine deaminase. In some embodiments, the reference adenosine deaminase is TadA*8.20 or TadA*8.19.

[0460] In some embodiments, the adenosine deaminase variant is an adenosine deaminase comprising two or more alterations at an amino acid position selected from the group consisting of 2, 4, 6, 8, 13, 17, 23, 27, 29, 30, 47, 48, 49, 67, 76, 77, 82, 84, 96, 100, 107, 112, 114, 115, 118, 119, 122, 127, 142, 143, 147, 149, 158, 159, 162 165, 166, and 167, of an amino acid sequence having at least about 70%, 75%, 80%, 85%, 90%, 95%, 98%, 99% or greater identity to SEQ ID NO: 1, or a corresponding alteration in another deaminase. I

[0461] In some embodiments, the adenosine deaminase variant is an adenosine deaminase comprising one or more alterations selected from the group consisting of S2H, V4K, V4S, V4T, V4Y, F6G, F6H, F6Y, H8Q, R13G, T17A, T17W, R23Q, E27C, E27G, E27H, E27K, E27Q, E27S, E27G, P29A, P29G, P29K, V30F, V30I, R47G, R47S, A48G, I49K, I49M, I49N, 149Q, 149T, G67W, 176H, I76R, I76W, Y76H, Y76R, Y76W, F84A, F84M, H96N, G100A, G100K, T111H, G112H, A114C, G115M, M118L, H122G, H122R, H122T, N127I, N127K, N127P, A142E, R147H, A158V, Q159S, A162C, A162N, A162Q, and S165P of an amino acid sequence having at least about 70%, 75%, 80%, 85%, 90%, 95%, 98%, 99% or greater identity to SEQ ID NO: 1, or a corresponding alteration in another deaminase.

[0462] In some embodiments, the adenosine deaminase variant is an adenosine deaminase comprising an amino acid alteration or combination of amino acid alterations selected from those listed in any of Tables 6A-6F.

[0463] The residue identity of exemplary adenosine deaminase variants that are capable of deaminating adenine and/or cytidine in a target polynucleotide (e.g., DNA) is provided in Tables 6A-6F below. Further examples of adenosine deaminase variants include the following variants of 1.17 (see Table 6A): 1.17+E27H; 1.17+E27K; 1.17+E27S; 1.17+E27S+I49K; 1.17+E27G; 1.17+149N; 1.17+E27G+149N; and 1.17+E27Q. In some embodiments, any of the amino acid alterations provided herein are substituted with a conservative amino acid. Additional mutations known in the art can be further added to any of the adenosine deaminase variants provided herein.

[0464] In some embodiments, the base editor systems comprising a CABE provided herein have at least about a 30%, 40%, 50%, 60%, 70% or more C to T editing activity in a target polynucleotide (e.g., DNA). In some embodiments, a base editor system comprising a CABE as provided herein has an increased C to T base editing activity (e.g., increased at least about 30-fold, 40-fold, 50-fold, 60-fold, 70-fold or more) relative to a reference base editor system comprising a reference adenosine deaminase (e.g., TadA*8.20 or TadA*8.19).

TABLE 6A
Adenosine Deaminase Variants. Mutations are indicated with reference to
TadA*8.20. “S” indicates “Surface,” and “NAS” indicates “Near Active Site.”

| location in | | | | | | | | | | | |
|---|---|---|---|---|---|---|---|---|---|---|---|
| structure | N/A | S h1 | S h1 | S h1 | NAS | NAS | NAS | NAS | | S | |
| Amino Acid | | | | | | | | | | | |
| No. (*START | | | | | | | | | | | |
| Met is AA#1) | 2 | 8 | 13 | 17 | 27 | 47 | 48 | 49 | 67 | 76 | 77 |
| TadA*8.20 | S | H | R | T | E | R | A | I | G | Y | D |
| TadA*8.19 | | | | | | | | | | I | |
| 1.1 | | | | | H | | | | | I | |
| 1.2 | | | | | H | | | K | | I | |
| 1.3 | | | | | S | | | K | | I | |
| 1.4 | | | | | S | | | K | | I | |
| 1.5 | | | | | K | | | | | | |
| 1.6 | | | | | K | | | | | | |
| 1.7 | | | | | H | | | | | I | |
| 1.8 | | | | | S | | | K | W | | |
| 1.9 | | | | | | | | T | W | | |
| 1.10 | | | | | C | | | | | I | |
| 1.11 | | | G | | Q | | | | | | |
| 1.12 | | | | A | H | | | M | | I | |
| 1.13 | | | | | | | | Q | | I | |
| 1.14 | H | | | | | | | K | | I | |
| 1.15 | | | | | | S | | | | | |
| 1.16 | | Q | | | | | | Q | | I | |
| 1.17 | | | | A | | | G | | | | |
| 1.18 | | | | | G | | | | | | |
| 1.19 | | | | | G | | | N | | | |
| 1.20 | | | | | G | | | | | | G |

Adenosine Deaminase Variants. Mutations are indicated with reference to
TadA*8.20. “I” indicates “Internal,” “S” indicates “Surface,” and “NAS” indicates “Near Active Site.”

| location in | | | | | | | | | | | | |
|---|---|---|---|---|---|---|---|---|---|---|---|---|
| structure | I | NAS | | NAS | S | | S | S | S | | S | |
| Amino Acid | | | | | | | | | | | | |
| No. (*START | | | | | | | | | | | | |
| Met is AA#1) | 82 | 84 | 96 | 107 | 112 | 115 | 118 | 119 | 127 | 142 | 162 | 165 |
| TadA*8.20 | S | F | H | R | G | G | M | D | N | A | A | S |
| TadA*8.19 | | | | | | | | | | | | |
| 1.1 | | M | | | | | | | | | | |
| 1.2 | | | | | | | | | | | | |
| 1.3 | | | | | | | | | | | | |
| 1.4 | | | | | | | | | | | N | |
| 1.5 | | | | | | | | | | | | |
| 1.6 | | | | | | | | N | | | | |
| 1.7 | | | | | | | | | | | | |
| 1.8 | | | | | | | | | | | | |
| 1.9 | | | N | | | | | | | | | |
| 1.10 | | | | | | | | N | | | | |
| 1.11 | | | | | | | | | K | | | |
| 1.12 | | | | | | | L | | | | | |
| 1.13 | | | | | | M | | | | | | |
| 1.14 | | | | | H | | | | | | | |
| 1.15 | | | | C | | | | | | | | |
| 1.16 | | | | | | | | | | | | |
| 1.17 | T | | | | | | | | | E | | |
| 1.18 | | | | | | | | | | | | |
| 1.19 | | | | | | | | | | | | |
| 1.20 | | | | | | | | | | | | P |

TABLE 6B
Adenosine deaminase variants. Mutations are indicated
with reference to TadA*8.20.

| Position | | | | | | | | | | |
|---|---|---|---|---|---|---|---|---|---|---|
| No. | 27 | 29 | 30 | 49 | 82 | 84 | 107 | 112 | 115 | 142 |
| TadA*8.20 | E | P | V | I | S | F | R | G | G | A |
| Alterations | | | | | | | | | | |
| Evaluated | G/S/H | G/A/K | I/L/F | K | T | L/A | C | H | M | E |
| S1.1 | S | | | K | T | | | | | |
| S1.2 | S | | | K | T | | C | | | |
| S1.3 | S | | | K | T | | | H | | |
| S1.4 | S | | | K | T | | | | M | |
| S1.5 | S | | | K | T | | | | | E |
| S1.6 | S | | | K | T | | C | H | | |
| S1.7 | S | | | K | T | | C | | M | |
| S1.8 | S | | | K | T | | C | | | E |
| S1.9 | S | | | K | T | | | H | | E |
| S1.10 | S | | | K | T | | | | M | E |
| S1.11 | S | | | K | T | | C | H | M | E |
| S1.12 | S | | I | K | T | | | | | |
| S1.13 | S | | I | K | T | | C | | | |
| S1.14 | S | | I | K | T | | | H | | |
| S1.15 | S | | I | K | T | | | | M | |
| S1.16 | S | | I | K | T | | | | | E |
| S1.17 | S | | I | K | T | | C | H | | |
| S1.18 | S | | I | K | T | | C | | M | |
| S1.19 | S | | I | K | T | | C | | | E |
| S1.20 | S | | I | K | T | | | H | | E |
| S1.21 | S | | I | K | T | | | | M | E |
| S1.22 | S | | I | K | T | | C | H | M | E |
| S1.23 | S | | L | K | T | | | | | |
| S1.24 | S | | L | K | T | | C | | | |
| S1.25 | S | | L | K | T | | | H | | |
| S1.26 | S | | L | K | T | | | | M | |
| S1.27 | S | | L | K | T | | | | | E |
| S1.28 | S | | L | K | T | | C | H | | |
| S1.29 | S | | L | K | T | | C | | M | |
| S1.30 | S | | L | K | T | | C | | | E |
| S1.31 | S | | L | K | T | | | H | | E |
| S1.32 | S | | L | K | T | | | | M | E |
| S1.33 | S | | L | K | T | | C | H | M | E |
| S1.34 | S | | F | K | T | A | | | | |
| S1.35 | S | | F | K | T | A | C | | | |
| S1.36 | S | | F | K | T | A | | H | | |
| S1.37 | S | | F | K | T | A | | | M | |
| S1.38 | S | | F | K | T | A | | | | E |
| S1.39 | S | | F | K | T | A | C | H | | |
| S1.40 | S | | F | K | T | A | C | | M | |
| S1.41 | S | | F | K | T | A | C | | | E |
| S1.42 | S | | F | K | T | A | | H | | E |
| S1.43 | S | | F | K | T | A | | | M | E |
| S1.44 | S | | F | K | T | A | C | H | M | E |
| S1.45 | S | | | K | T | L | | | | |
| S1.46 | S | | | K | T | L | C | | | |
| S1.47 | S | | | K | T | L | | H | | |
| S1.48 | S | | | K | T | L | | | M | |
| S1.49 | S | | | K | T | L | | | | E |
| S1.50 | S | | | K | T | L | C | H | | |
| S1.51 | S | | | K | T | L | C | | M | |
| S1.52 | S | | | K | T | L | C | | | E |
| S1.53 | S | | | K | T | L | | H | | E |
| S1.54 | S | | | K | T | L | | | M | E |
| S1.55 | S | | | K | T | L | C | H | M | E |
| S1.56 | S | | I | K | T | L | | | | |
| S1.57 | S | | I | K | T | L | C | | | |
| S1.58 | S | | I | K | T | L | | H | | |
| S1.59 | S | | I | K | T | L | | | M | |
| S1.60 | S | | I | K | T | L | | | | E |
| S1.61 | S | | I | K | T | L | C | H | | |
| S1.62 | S | | I | K | T | L | C | | M | |
| S1.63 | S | | I | K | T | L | C | | | E |
| S1.64 | S | | I | K | T | L | | H | | E |
| S1.65 | S | | I | K | T | L | | | M | E |
| S1.66 | S | | I | K | T | L | C | H | M | E |
| S1.67 | S | G | | K | T | | | | | |
| S1.68 | S | G | | K | T | | C | | | |
| S1.69 | S | G | | K | T | | | H | | |
| S1.70 | S | G | | K | T | | | | M | |
| S1.71 | S | G | | K | T | | | | | E |
| S1.72 | S | G | | K | T | | C | H | | |
| S1.73 | S | G | | K | T | | C | | M | |
| S1.74 | S | G | | K | T | | C | | | E |
| S1.75 | S | G | | K | T | | | H | | E |
| S1.76 | S | G | | K | T | | | | M | E |
| S1.77 | S | G | | K | T | | C | H | M | E |
| S1.78 | | G | | K | T | | | | | |
| S1.79 | | G | | K | T | | C | | | |
| S1.80 | | G | | K | T | | | H | | |
| S1.81 | | G | | K | T | | | | M | |
| S1.82 | | G | | K | T | | | | | E |
| S1.83 | | G | | K | T | | C | H | | |
| S1.84 | | G | | K | T | | C | | M | |
| S1.85 | | G | | K | T | | C | | | E |
| S1.86 | | G | | K | T | | | H | | E |
| S1.87 | | G | | K | T | | | | M | E |
| S1.88 | | G | | K | T | | C | H | M | E |
| S1.89 | | K | | K | T | | | | | |
| S1.90 | | K | | K | T | | C | | | |
| S1.91 | | K | | K | T | | | H | | |
| S1.92 | | K | | K | T | | | | M | |
| S1.93 | | K | | K | T | | | | | E |
| S1.94 | | K | | K | T | | C | H | | |
| S1.95 | | K | | K | T | | C | | M | |
| S1.96 | | K | | K | T | | C | | | E |
| S1.97 | | K | | K | T | | | H | | E |
| S1.98 | | K | | K | T | | | | M | E |
| S1.99 | | K | | K | T | | C | H | M | E |
| S1.100 | | K | I | K | T | | | | | |
| S1.101 | | K | I | K | T | | C | | | |
| S1.102 | | K | I | K | T | | | H | | |
| S1.103 | | K | I | K | T | | | | M | |
| S1.104 | | K | I | K | T | | | | | E |
| S1.105 | | K | I | K | T | | C | H | | |
| S1.106 | | K | I | K | T | | C | | M | |
| S1.107 | | K | I | K | T | | C | | | E |
| S1.108 | | K | I | K | T | | | H | | E |
| S1.109 | | K | I | K | T | | | | M | E |
| S1.110 | | K | I | K | T | | C | H | M | E |
| S1.111 | | K | | K | T | L | | | | |
| S1.112 | | K | | K | T | L | C | | | |
| S1.113 | | K | | K | T | L | | H | | |
| S1.114 | | K | | K | T | L | | | M | |
| S1.115 | | K | | K | T | L | | | | E |
| S1.116 | | K | | K | T | L | C | H | | |
| S1.117 | | K | | K | T | L | C | | M | |
| S1.118 | | K | | K | T | L | C | | | E |
| S1.119 | | K | | K | T | L | | H | | E |
| S1.120 | | K | | K | T | L | | | M | E |
| S1.121 | | K | | K | T | L | C | H | M | E |
| S1.122 | | K | I | K | T | L | | | | |
| S1.123 | | K | I | K | T | L | C | | | |
| S1.124 | | K | I | K | T | L | | H | | |
| S1.125 | | K | I | K | T | L | | | M | |
| S1.126 | | K | I | K | T | L | | | | E |
| S1.127 | | K | I | K | T | L | C | H | | |
| S1.128 | | K | I | K | T | L | C | | M | |
| S1.129 | | K | I | K | T | L | C | | | E |
| S1.130 | | K | I | K | T | L | | H | | E |
| S1.131 | | K | I | K | T | L | | | M | E |
| S1.132 | | K | I | K | T | L | C | H | M | E |
| S1.133 | G | | | K | T | | | | | |
| S1.134 | G | | | K | T | | C | | | |
| S1.135 | G | | | K | T | | | H | | |
| S1.136 | G | | | K | T | | | | M | |
| S1.137 | G | | | K | T | | | | | E |
| S1.138 | G | | | K | T | | C | H | | |
| S1.139 | G | | | K | T | | C | | M | |
| S1.140 | G | | | K | T | | C | | | E |
| S1.141 | G | | | K | T | | | H | | E |
| S1.142 | G | | | K | T | | | | M | E |
| S1.143 | G | | | K | T | | C | H | M | E |
| S1.144 | H | | | K | T | | | | | |
| S1.145 | H | | | K | T | | C | | | |
| S1.146 | H | | | K | T | | | H | | |
| S1.147 | H | | | K | T | | | | M | |
| S1.148 | H | | | K | T | | | | | E |
| S1.149 | H | | | K | T | | C | H | | |
| S1.150 | H | | | K | T | | C | | M | |
| S1.151 | H | | | K | T | | C | | | E |
| S1.152 | H | | | K | T | | | H | | E |
| S1.153 | H | | | K | T | | | | M | E |
| S1.154 | H | | | K | T | | C | H | M | E |
| S1.155 | S | | | | T | | | | | |
| S1.156 | S | | | | T | | C | | | |
| S1.157 | S | | | | T | | | H | | |
| S1.158 | S | | | | T | | | | M | |
| S1.159 | S | | | | T | | | | | E |
| S1.160 | S | | | | T | | C | H | | |
| S1.161 | S | | | | T | | C | | M | |
| S1.162 | S | | | | T | | C | | | E |
| S1.163 | S | | | | T | | | H | | E |
| S1.164 | S | | | | T | | | | M | E |
| S1.165 | S | | | | T | | C | H | M | E |
| S1.166 | | A | | | T | | | | | |
| S1.167 | | A | | | T | | C | | | |
| S1.168 | | A | | | T | | | H | | |
| S1.169 | | A | | | T | | | | M | |
| S1.170 | | A | | | T | | | | | E |
| S1.171 | | A | | | T | | C | H | | |
| S1.172 | | A | | | T | | C | | M | |
| S1.173 | | A | | | T | | C | | | E |
| S1.174 | | A | | | T | | | H | | E |
| S1.175 | | A | | | T | | | | M | E |
| S1.176 | | A | | | T | | C | H | M | E |
| S1.177 | S | | I | | T | | | | | |
| S1.178 | S | | I | | T | | C | | | |
| S1.179 | S | | I | | T | | | H | | |
| S1.180 | S | | I | | T | | | | M | |
| S1.181 | S | | I | | T | | | | | E |
| S1.182 | S | | I | | T | | C | H | | |
| S1.183 | S | | I | | T | | C | | M | |
| S1.184 | S | | I | | T | | C | | | E |
| S1.185 | S | | I | | T | | | H | | E |
| S1.186 | S | | I | | T | | | | M | E |
| S1.187 | S | | I | | T | | C | H | M | E |
| S1.188 | | A | I | | T | L | | | | |
| S1.189 | | A | I | | T | L | C | | | |
| S1.190 | | A | I | | T | L | | H | | |
| S1.191 | | A | I | | T | L | | | M | |
| S1.192 | | A | I | | T | L | | | | E |
| S1.193 | | A | I | | T | L | C | H | | |
| S1.194 | | A | I | | T | L | C | | M | |
| S1.195 | | A | I | | T | L | C | | | E |
| S1.196 | | A | I | | T | L | | H | | E |
| S1.197 | | A | I | | T | L | | | M | E |
| S1.198 | | A | I | | T | L | C | H | M | E |
| S1.199 | S | A | L | K | T | L | C | H | M | E |

TABLE 6C
Adenosine deaminase variants. Mutations are indicated with reference to variant 1.2 (Table 6A).

| | | Residue identity (START Met is amino | | | | | | | | |
|---|---|---|---|---|---|---|---|---|---|---|
| | | acid #1) | | | | | | | | |
| Variant Name | Alternative Variant Names | 4 | 6 | 17 | 23 | 76 | 77 | 100 | 111 | 114 |
| Reference | 1.2 (see Table 6A) | V | F | T | R | I | D | G | T | A |
| TadAC2.1 | pDKL-135; 2.1 | K | | | | | | | | C |
| TadAC2.2 | pDKL-136; 2.2 | K | | | | | G | | | |
| TadAC2.3 | pDKL-137; 2.3 | | Y | | | | | A | | |
| TadAC2.4 | pDKL-138; 2.4 | T | | | | R | | | | |
| TadAC2.5 | pDKL-139; 2.5 | | Y | | | W | | | | |
| TadAC2.6 | pDKL-140; 2.6 | | Y | | | | | | | |
| TadAC2.7 | pDKL-141; 2.7 | | Y | | | | | | | C |
| TadAC2.8 | pDKL-142; 2.8 | | Y | | | | | | | |
| TadAC2.9 | pDKL-143; 2.9 | K | | | | W | | | | |
| TadAC2.10 | pDKL-144; 2.10 | | G | | | R | | K | | |
| TadAC2.11 | pDKL-145; 2.11 | | H | | | | | | | |
| TadAC2.12 | pDKL-146; 2.12 | | | | | | | | | C |
| TadAC2.13 | pDKL-147; 2.13 | | Y | | | H | | | | |
| TadAC2.14 | pDKL-148; 2.14 | | | | | | | | | |
| TadAC2.15 | pDKL-149; 2.15 | | | | Q | R | | | | |
| TadAC2.16 | pDKL-150; 2.16 | | | | | H | | | | |
| TadAC2.17 | pDKL-151; 2.17 | | Y | | | | | | H | |
| TadAC2.18 | pDKL-152; 2.18 | | | | | W | | | | |
| TadAC2.19 | pDKL-153; 2.19 | | | | | | | | H | |
| TadAC2.20 | pDKL-154; 2.20 | | | | | | | | | |
| TadAC2.21 | pDKL-155; 2.21 | | Y | | | R | | | | |
| TadAC2.22 | pDKL-156; 2.22 | | | W | | H | | | | |
| TadAC2.23 | pDKL-157; 2.23 | S | | | | Y | | | | |
| TadAC2.24 | pDKL-158; 2.24 | | | | | | | | | |
| | | Residue identity (START Met is | | | | | | | | |
| | | amino acid #1) | | | | | | | | |
| Variant Name | Alternative Variant Names | 119 | 122 | 127 | 143 | 147 | 158 | 159 | 162 | 166 |
| Reference | 1.2 (see Table 6A) | D | H | N | A | R | A | Q | A | T |
| TadAC2.1 | pDKL-135; 2.1 | | | | | | | | | |
| TadAC2.2 | pDKL-136; 2.2 | | | | | | | | | |
| TadAC2.3 | pDKL-137; 2.3 | | R | | | | | | | |
| TadAC2.4 | pDKL-138; 2.4 | | G | | | | | | | |
| TadAC2.5 | pDKL-139; 2.5 | | | | | | | | | |
| TadAC2.6 | pDKL-140; 2.6 | N | | | | | | | | |
| TadAC2.7 | pDKL-141; 2.7 | | | | | | | | | |
| TadAC2.8 | pDKL-142; 2.8 | | | | | | | | | |
| TadAC2.9 | pDKL-143; 2.9 | | T | | | | | | | |
| TadAC2.10 | pDKL-144; 2.10 | | | | | | | | | |
| TadAC2.11 | pDKL-145; 2.11 | | N | | | | | | | |
| TadAC2.12 | pDKL-146; 2.12 | | | | | | | | | |
| TadAC2.13 | pDKL-147; 2.13 | | R | | | | | | | I |
| TadAC2.14 | pDKL-148; 2.14 | | | P | | | | | | |
| TadAC2.15 | pDKL-149; 2.15 | | | | | | | | | |
| TadAC2.16 | pDKL-150; 2.16 | | R | | | | V | | | |
| TadAC2.17 | pDKL-151; 2.17 | | | | | | | | | |
| TadAC2.18 | pDKL-152; 2.18 | | | | | | | | | |
| TadAC2.19 | pDKL-153; 2.19 | | G | | | | | | C | |
| TadAC2.20 | pDKL-154; 2.20 | | | | E | | | | | |
| TadAC2.21 | pDKL-155; 2.21 | | | | | | | | | |
| TadAC2.22 | pDKL-156; 2.22 | | G | | | | V | | | |
| TadAC2.23 | pDKL-157; 2.23 | | | | E | | | S | | |
| TadAC2.24 | pDKL-158; 2.24 | | | I | | | | | Q | |

TABLE 6D
Adenosine deaminase variants. Mutations are indicated with reference to TadA*8.20.

| AA Positions | 6 | 27 | 49 | 76 | 77 | 82 | 107 | 112 | 114 | 115 | 119 | 122 | 127 | 142 | 143 |
|---|---|---|---|---|---|---|---|---|---|---|---|---|---|---|---|
| TadA*8.20 | F | E | I | Y | D | S | R | G | A | G | D | H | N | A | A |
| S1.154 | F | H | K | Y | D | T | C | H | | M | | | | E | |
| Alterations | Y | | | W | G | | | | C | | N | G | P | | E |
| from Table | | | | | | | | | | | | | | | |
| 6C | | | | | | | | | | | | | | | |
| S2.1 | Y | H | K | W | | T | C | H | | M | | | | E | |
| S2.2 | Y | H | K | | G | T | C | H | | M | | | | E | |
| S2.3 | Y | H | K | | | T | C | H | C | M | | | | E | |
| S2.4 | Y | H | K | | | T | C | H | | M | N | | | E | |
| S2.5 | Y | H | K | | | T | C | H | | M | | G | | E | |
| S2.6 | Y | H | K | | | T | C | H | | M | | | P | E | |
| S2.7 | Y | H | K | | | T | C | H | | M | | | | E | E |
| S2.8 | Y | H | K | | | T | C | H | | M | | | | A | E |
| S2.9 | Y | H | K | W | G | T | C | H | | M | | | | E | |
| S2.10 | Y | H | K | W | | T | C | H | C | M | | | | E | |
| S2.11 | Y | H | K | W | | T | C | H | | M | N | | | E | |
| S2.12 | Y | H | K | W | | T | C | H | | M | | G | | E | |
| S2.13 | Y | H | K | W | | T | C | H | | M | | | P | E | |
| S2.14 | Y | H | K | W | | T | C | H | | M | | | | E | E |
| S2.15 | Y | H | K | W | | T | C | H | | M | | | | A | E |
| S2.16 | Y | H | K | | G | T | C | H | C | M | | | | E | |
| S2.17 | Y | H | K | | G | T | C | H | | M | N | | | E | |
| S2.18 | Y | H | K | | G | T | C | H | | M | | G | | E | |
| S2.19 | Y | H | K | | G | T | C | H | | M | | | P | E | |
| S2.20 | Y | H | K | | G | T | C | H | | M | | | | E | E |
| S2.21 | Y | H | K | | G | T | C | H | | M | | | | A | E |
| S2.22 | Y | H | K | | | T | C | H | C | M | N | | | E | |
| S2.23 | Y | H | K | | | T | C | H | C | M | | G | | E | |
| S2.24 | Y | H | K | | | T | C | H | C | M | | | P | E | |
| S2.25 | Y | H | K | | | T | C | H | | M | N | G | | E | |
| S2.26 | Y | H | K | | | T | C | H | | M | N | | P | E | |
| S2.27 | Y | H | K | | | T | C | H | | M | | G | P | E | |
| S2.28 | Y | H | K | W | G | T | C | H | C | M | | | | E | |
| S2.29 | Y | H | K | W | G | T | C | H | | M | N | | | E | |
| S2.30 | Y | H | K | W | G | T | C | H | | M | | G | | E | |
| S2.31 | Y | H | K | W | G | T | C | H | | M | | | P | E | |
| S2.32 | Y | H | K | W | G | T | C | H | | M | | | | E | E |
| S2.33 | Y | H | K | W | G | T | C | H | | M | | | | A | E |
| S2.34 | Y | H | K | W | | T | C | H | C | M | N | | | E | |
| S2.35 | Y | H | K | W | | T | C | H | C | M | | G | | E | |
| S2.36 | Y | H | K | W | | T | C | H | C | M | | | P | E | |
| S2.37 | Y | H | K | W | | T | C | H | C | M | | | | E | E |
| S2.38 | Y | H | K | W | | T | C | H | C | M | | | | A | E |
| S2.39 | Y | H | K | W | | T | C | H | | M | N | G | | E | |
| S2.40 | Y | H | K | W | | T | C | H | | M | N | | P | E | |
| S2.41 | Y | H | K | M | | T | C | H | | M | | G | P | E | |
| S2.42 | Y | H | K | W | | T | C | H | C | M | N | G | | E | |
| S2.43 | Y | H | K | W | | T | C | H | C | M | N | | P | E | |
| S2.44 | Y | H | K | W | | T | C | H | C | M | | G | P | E | |
| S2.45 | Y | H | K | W | G | T | C | H | C | M | N | | | E | |
| S2.46 | Y | H | K | W | G | T | C | H | C | M | | G | | E | |
| S2.47 | Y | H | K | W | G | T | C | H | C | M | | | P | E | |
| S2.48 | Y | H | K | W | G | T | C | H | C | M | | | | E | E |
| S2.49 | Y | H | K | W | G | T | C | H | C | M | | | | A | E |
| S2.50 | Y | H | K | W | G | T | C | H | C | M | N | G | | E | |
| S2.51 | Y | H | K | W | G | T | C | H | C | M | N | | P | E | |
| S2.52 | Y | H | K | W | G | T | C | H | C | M | | G | P | E | |
| S2.53 | Y | H | K | W | | T | C | H | C | M | N | G | P | E | E |
| S2.54 | Y | H | K | W | | T | C | H | C | M | N | G | P | A | E |
| S2.55 | Y | H | K | W | G | T | C | H | C | M | N | G | P | E | E |
| S2.56 | Y | H | K | W | G | T | C | H | C | M | N | G | P | A | E |

TABLE 6E
Hybrid constructs. Mutations are indicated with reference
to TadA*7.10.

| | TadA amino acid subsitutions | | | | | | | | | | | |
|---|---|---|---|---|---|---|---|---|---|---|---|---|
| | 76 | 82 | 109 | 111 | 119 | 122 | 123 | 147 | 149 | 154 | 166 | 167 |
| TadA*7.10 | I | V | A | T | D | H | Y | Y | F | Q | T | D |
| TadA*8e | | | S | R | N | N | | D | Y | | I | N |
| TadA*8.20 | Y | S | | | | | H | R | | R | | |
| TadA*8.17 | | S | | | | | | | | R | | |
| pNMG-B878 | Y | S | | | | | H | D | | R | | |
| pNMG-B879 | Y | S | | | | | H | R | Y | R | | |
| pNMG-B880 | Y | S | | | | | H | R | | R | I | |
| pNMG-B881 | Y | S | | | | | H | R | | R | | N |
| pNMG-B882 | Y | S | | | | | H | D | Y | R | I | N |
| pNMG-B883 | Y | S | | R | N | | H | R | | R | | |
| pNMG-B884 | Y | S | S | R | N | N | H | R | | R | | |
| pNMG-B885 | Y | S | S | | | | H | R | | R | | |
| pNMG-B886 | Y | S | | R | | | H | R | | R | | |
| pNMG-B887 | Y | S | | | N | | H | R | | R | | |
| pNMG-B888 | Y | S | | | | N | H | R | | R | | |
| pNMG-B889 | Y | S | S | R | | | H | R | | R | | |
| pNMG-B890 | Y | S | | | N | N | H | R | | R | | |
| pNMG-B891 | Y | S | S | R | N | N | H | D | Y | R | I | N |

TABLE 6F
Base editor variants. Mutations are indicated with reference to
TadA*8.19/8.20.

| AA positions: | 17 | 27 | 48 | 49 | 76 | 82 | 84 | 118 | 142 | 147 | 149 | 166 | 167 |
|---|---|---|---|---|---|---|---|---|---|---|---|---|---|
| ABE8.19m/8.20m | T | E | A | I | Y/I | S | F | M | A | Y | F | T | D |
| 1.1 + 8e(B879) | | H | | | I | | M | | | | Y | | |
| 1.2 + 8e(B879) | | H | | K | I | | | | | | Y | | |
| 1.12 + 8e(B879) | A | H | | M | I | | | L | | | Y | | |
| 1.17 + 8e(B879) | A | | G | | | T | | | E | | Y | | |
| 1.18 + 8e(B879) | | G | | | | | | | | | Y | | |
| 1.19 + 8e(B879) | | G | | N | | | | | | | Y | | |
| 1.1 + 8e(B882) | | H | | | I | | M | | | D | Y | I | N |
| 1.2 + 8e(B882) | | H | | K | I | | | | | D | Y | I | N |
| 1.12 + 8e(B882) | A | H | | M | I | | | L | | D | Y | I | N |
| 1.17 + 8e(B882) | A | | G | | | T | | | E | D | Y | I | N |
| 1.18 + 8e(B882) | | G | | | | | | | | D | Y | I | N |
| 1.19 + 8e(B882) | | G | | N | | | | | | D | Y | I | N |

### Guide Polynucleotides

[0465] A polynucleotide programmable nucleotide binding domain, when in conjunction with a bound guide polynucleotide (e.g., gRNA), can specifically bind to a target polynucleotide sequence (i.e., via complementary base pairing between bases of the bound guide nucleic acid and bases of the target polynucleotide sequence) and thereby localize the base editor to the target nucleic acid sequence desired to be edited. In some embodiments, the target polynucleotide sequence comprises single-stranded DNA or double-stranded DNA. In some embodiments, the target polynucleotide sequence comprises RNA. In some embodiments, the target polynucleotide sequence comprises a DNA-RNA hybrid.

[0466] In an embodiment, a guide polynucleotide described herein can be RNA or DNA. In one embodiment, the guide polynucleotide is a gRNA.

[0467] In some embodiments, the guide polynucleotide is at least one single guide RNA (“sgRNA” or “gRNA”). In some embodiments, a guide polynucleotide comprises two or more individual polynucleotides, which can interact with one another via for example complementary base pairing (e.g., a dual guide polynucleotide, dual gRNA). For example, a guide polynucleotide can comprise a CRISPR RNA (crRNA) and a trans-activating CRISPR RNA (tracrRNA) or can comprise one or more trans-activating CRISPR RNA (tracrRNA).

[0468] A guide polynucleotide may include natural or non-natural (or unnatural) nucleotides (e.g., peptide nucleic acid or nucleotide analogs). In some cases, the targeting region of a guide nucleic acid sequence (e.g., a spacer) can be at least 15, 16, 17, 18, 19, 20, 21, 22, 23, 24, 25, 26, 27, 28, 29, or 30 nucleotides in length.

[0469] In some embodiments, the methods described herein can utilize an engineered Cas protein. A guide RNA (gRNA) is a short synthetic RNA composed of a scaffold sequence necessary for Cas-binding and a user-defined ˜20 nucleotide spacer that defines the genomic target to be modified. Exemplary gRNA scaffold sequences are provided in the sequence listing as SEQ ID NOs: 317-327 and 425. Thus, a skilled artisan can change the genomic target of the Cas protein specificity is partially determined by how specific the gRNA targeting sequence is for the genomic target compared to the rest of the genome. In embodiments, the spacer is about 10, 11, 12, 13, 14, 15, 16, 17, 18, 19, 20, 22, 23, 24, 25, or more nucleotides in length. The spacer of a gRNA can be or can be about 19, 20, or 21 nucleotides in length.

[0470] A gRNA or a guide polynucleotide can target any exon or intron of a gene target. In some embodiments, a composition comprises multiple gRNAs that all target the same exon or multiple gRNAs that target different exons. An exon and/or an intron of a gene can be targeted. A gRNA or a guide polynucleotide can target a nucleic acid sequence of about 20 nucleotides or less than about 20 nucleotides (e.g., at least about 5, 10, 15, 16, 17, 18, 19, 20, 21, 22, 23, 24, 25, 30 nucleotides), or anywhere between about 1-100 nucleotides (e.g., 5, 10, 15, 16, 17, 18, 19, 20, 21, 22, 23, 24, 25, 30, 40, 50, 60, 70, 80, 90, 100). A target nucleic acid sequence can be or can be about 20 bases immediately 5′ of the first nucleotide of the PAM. A gRNA can target a nucleic acid sequence. A target nucleic acid can be at least or at least about 1-10, 1-20, 1-30, 1-40, 1-50, 1-60, 1-70, 1-80, 1-90, or 1-100 nucleotides.

[0471] The guide polynucleotides can comprise standard ribonucleotides, modified ribonucleotides (e.g., pseudouridine), ribonucleotide isomers, and/or ribonucleotide analogs.

[0472] In some embodiments, a base editor system may comprise multiple guide polynucleotides, e.g., gRNAs. For example, the gRNAs may target to one or more target loci (e.g., at least 1 gRNA, at least 2 gRNA, at least 5 gRNA, at least 10 gRNA, at least 20 gRNA, at least 30 g RNA, at least 50 gRNA) comprised in a base editor system. The multiple gRNA sequences can be tandemly arranged and may be separated by a direct repeat.

### Modified Polynucleotides

[0473] To enhance expression, stability, and/or genomic/base editing efficiency, and/or reduce possible toxicity, the base editor-coding sequence (e.g., mRNA) and/or the guide polynucleotide (e.g., gRNA) can be modified to include one or more modified nucleotides and/or chemical modifications, e.g. using pseudo-uridine, 5-Methyl-cytosine, 2′-O-methyl-3′-phosphonoacetate, 2′-O-methyl thioPACE (MSP), 2′-O-methyl-PACE (MP), 2′-fluoro RNA (2′-F-RNA), =constrained ethyl (S-cEt), 2′-O-methyl (‘M’), 2′-O-methyl-3′-phosphorothioate (‘MS’), 2′-O-methyl-3′-thiophosphonoacetate (‘MSP’), 5-methoxyuridine, phosphorothioate, and N₁-Methylpseudouridine. Chemically protected gRNAs can enhance stability and editing efficiency in vivo and ex vivo. Methods for using chemically modified mRNAs and guide RNAs are known in the art and described, for example, by Jiang et al., Chemical modifications of adenine base editor mRNA and guide RNA expand its application scope. Nat Commun 11, 1979 (2020). doi.org/10.1038/s41467-020-15892-8, Callum et al., NI-Methylpseudouridine substitution enhances the performance of synthetic mRNA switches in cells, Nucleic Acids Research, Volume 48, Issue 6, 6 Apr. 2020, Page e35, and Andries et al., Journal of Controlled Release, Volume 217, 10 Nov. 2015, Pages 337-344, each of which is incorporated herein by reference in its entirety.

[0474] In some embodiments, the guide polynucleotide comprises one or more modified nucleotides at the 5′ end and/or the 3′ end of the guide. In some embodiments, the guide polynucleotide comprises two, three, four or more modified nucleosides at the 5′ end and/or the 3′ end of the guide. In some embodiments, the guide polynucleotide comprises two, three, four or more modified nucleosides at the 5′ end and/or the 3′ end of the guide.

[0475] In some embodiments, the guide comprises at least about 50%-75% modified nucleotides. In some embodiments, the guide comprises at least about 85% or more modified nucleotides. In some embodiments, at least about 1-5 nucleotides at the 5′ end of the gRNA are modified and at least about 1-5 nucleotides at the 3′ end of the gRNA are modified. In some embodiments, at least about 3-5 contiguous nucleotides at each of the 5′ and 3′ termini of the gRNA are modified. In some embodiments, at least about 20% of the nucleotides present in a direct repeat or anti-direct repeat are modified. In some embodiments, at least about 50% of the nucleotides present in a direct repeat or anti-direct repeat are modified. In some embodiments, at least about 50-75% of the nucleotides present in a direct repeat or anti-direct repeat are modified. In some embodiments, at least about 100 of the nucleotides present in a direct repeat or anti-direct repeat are modified. In some embodiments, at least about 20% or more of the nucleotides present in a hairpin present in the gRNA scaffold are modified. In some embodiments, at least about 50% or more of the nucleotides present in a hairpin present in the gRNA scaffold are modified. In some embodiments, the guide comprises a variable length spacer. In some embodiments, the guide comprises a 20-40 nucleotide spacer. In some embodiments, the guide comprises a spacer comprising at least about 20-25 nucleotides or at least about 30-35 nucleotides. In some embodiments, the spacer comprises modified nucleotides. In some embodiments, the guide comprises two or more of the following:
[0476] at least about 1-5 nucleotides at the 5′ end of the gRNA are modified and at least about 1-5 nucleotides at the 3′ end of the gRNA are modified;
[0477] at least about 20% of the nucleotides present in a direct repeat or anti-direct repeat are modified;
[0478] at least about 50-75% of the nucleotides present in a direct repeat or anti-direct repeat are modified;
[0479] at least about 20% or more of the nucleotides present in a hairpin present in the gRNA scaffold are modified;
[0480] a variable length spacer; and
[0481] a spacer comprising modified nucleotides.

[0482] In embodiments, the gRNA contains numerous modified nucleotides and/or chemical modifications (“heavy mods”). Such heavy mods can increase base editing ˜2 fold in vivo or in vitro. In embodiments, the gRNA comprises 2′-O-methyl or phosphorothioate modifications. In an embodiment, the gRNA comprises 2′-O-methyl and phosphorothioate modifications. In an embodiment, the modifications increase base editing by at least about 2 fold.

[0483] A guide polynucleotide can comprise one or more modifications to provide a nucleic acid with a new or enhanced feature. A guide polynucleotide can comprise a nucleic acid affinity tag. A guide polynucleotide can comprise synthetic nucleotide, synthetic nucleotide analog, nucleotide derivatives, and/or modified nucleotides.

[0484] A gRNA or a guide polynucleotide can also be modified by 5′ adenylate, 5′ guanosine-triphosphate cap, 5′ N₇-Methylguanosine-triphosphate cap, 5′ triphosphate cap, 3′ phosphate, 3′ thiophosphate, 5′ phosphate, 5′ thiophosphate, Cis-Syn thymidine dimer, trimers, C₁₂ spacer, C₃ spacer, C₆ spacer, dSpacer, PC spacer, rSpacer, Spacer 18, Spacer 9, 3′-3′ modifications, 2′-O-methyl thioPACE (MSP), 2′-O-methyl-PACE (MP), and constrained ethyl (S-cEt), 5′-5′ modifications, abasic, acridine, azobenzene, biotin, biotin BB, biotin TEG, cholesteryl TEG, desthiobiotin TEG, DNP TEG, DNP-X, DOTA, dT-Biotin, dual biotin, PC biotin, psoralen C₂, psoralen C₆, TINA, 3′ DABCYL, black hole quencher 1, black hole quencher 2, DABCYL SE, dT-DABCYL, IRDye QC-1, QSY-21, QSY-35, QSY-7, QSY-9, carboxyl linker, thiol linkers, 2′-deoxyribonucleoside analog purine, 2′-deoxyribonucleoside analog pyrimidine, ribonucleoside analog, 2′-O-methyl ribonucleoside analog, sugar modified analogs, wobble/universal bases, fluorescent dye label, 2′-fluoro RNA, 2′-O-methyl RNA, methylphosphonate, phosphodiester DNA, phosphodiester RNA, phosphothioate DNA, phosphorothioate RNA, UNA, pseudouridine-5′-triphosphate, 5′-methylcytidine-5′-triphosphate, or any combination thereof.

[0485] In some cases, a phosphorothioate enhanced RNA gRNA can inhibit RNase A, RNase T1, calf serum nucleases, or any combinations thereof. These properties can allow the use of PS-RNA gRNAs to be used in applications where exposure to nucleases is of high probability in vivo or in vitro. For example, phosphorothioate (PS) bonds can be introduced between the last 3-5 nucleotides at the 5′- or 3′-end of a gRNA which can inhibit exonuclease degradation. In some cases, phosphorothioate bonds can be added throughout an entire gRNA to reduce attack by endonucleases.

### Fusion Proteins or Complexes Comprising a Nuclear Localization Sequence (NLS)

[0486] In some embodiments, the fusion proteins or complexes provided herein further comprise one or more (e.g., 2, 3, 4, 5) nuclear targeting sequences, for example a nuclear localization sequence (NLS). In one embodiment, a bipartite NLS is used. In some embodiments, a NLS comprises an amino acid sequence that facilitates the importation of a protein, that comprises an NLS, into the cell nucleus (e.g., by nuclear transport). In some embodiments, the NLS is fused to the N-terminus or the C-terminus of the fusion protein. In some embodiments, the NLS is fused to the C-terminus or N-terminus of an nCas9 domain or a dCas9 domain. In some embodiments, the NLS is fused to the N-terminus or C-terminus of the Cas 12 domain. In some embodiments, the NLS is fused to the N-terminus or C-terminus of the cytidine or adenosine deaminase. In some embodiments, the NLS is fused to the fusion protein via one or more linkers. In some embodiments, the NLS is fused to the fusion protein without a linker. In some embodiments, the NLS comprises an amino acid sequence of any one of the NLS sequences provided or referenced herein. Additional nuclear localization sequences are known in the art and would be apparent to the skilled artisan. For example, NLS sequences are described in Plank et al., PCT/EP2000/011690, the contents of which are incorporated herein by reference for their disclosure of exemplary nuclear localization sequences.

[0487] In some embodiments, the NLS is present in a linker or the NLS is flanked by linkers, for example described herein. A bipartite NLS comprises two basic amino acid clusters, which are separated by a relatively short spacer sequence (hence bipartite-2 parts, while monopartite NLSs are not). The NLS of nucleoplasmin, KR [PAATKKAGQA] KKKK (SEQ ID NO: 191), is the prototype of the ubiquitous bipartite signal: two clusters of basic amino acids, separated by a spacer of about 10 amino acids. The sequence of an exemplary bipartite NLS follows:

(SEQ ID NO: 328)
PKKKRKVEGADKRTADGSEFESPKKKRKV.

[0488] In some embodiments, any of the fusion proteins or complexes provided herein comprise an NLS comprising the amino acid sequence EGADKRTADGSEFESPKKKRKV (amino acids 8 to 29 of SEQ ID NO 328). In some embodiments, any of the adenosine base editors provided herein comprise the amino acid sequence EGADKRTADGSEFESPKKKRKV (amino acids 8 to 29 of SEQ ID NO: 328). In some embodiments, the NLS is at a C-terminal portion of the adenosine base editor. In some embodiments, the NLS is at the C-terminus of the adenosine base editor.

### Additional Domains

[0489] A base editor described herein can include any domain which helps to facilitate the nucleobase editing, modification or altering of a nucleobase of a polynucleotide. In some embodiments, a base editor comprises a polynucleotide programmable nucleotide binding domain (e.g., Cas9), a nucleobase editing domain (e.g., deaminase domain), and one or more additional domains. In some embodiments, the additional domain can facilitate enzymatic or catalytic functions of the base editor, binding functions of the base editor, or be inhibitors of cellular machinery (e.g., enzymes) that could interfere with the desired base editing result. In some embodiments, a base editor comprises a nuclease, a nickase, a recombinase, a deaminase, a methyltransferase, a methylase, an acetylase, an acetyltransferase, a transcriptional activator, or a transcriptional repressor domain.

[0490] In some embodiments, a base editor comprises an uracil glycosylase inhibitor (UGI) domain. In some cases, a base editor is expressed in a cell in trans with a UGI polypeptide. In some embodiments, cellular DNA repair response to the presence of U: G heteroduplex DNA can be responsible for a reduction in nucleobase editing efficiency in cells. In such embodiments, uracil DNA glycosylase (UDG) can catalyze removal of U from DNA in cells, which can initiate base excision repair (BER), mostly resulting in reversion of the U: G pair to a C: G pair. In such embodiments, BER can be inhibited in base editors comprising one or more domains that bind the single strand, block the edited base, inhibit UGI, inhibit BER, protect the edited base, and/or promote repairing of the non-edited strand. Thus, this disclosure contemplates a base editor fusion protein or complex comprising a UGI domain and/or a uracil stabilizing protein (USP) domain.

### Base Editor System

[0491] Provided herein are systems, compositions, and methods for editing a nucleobase using a base editor system. In some embodiments, the base editor system comprises (1) a base editor (BE) comprising a polynucleotide programmable nucleotide binding domain and a nucleobase editing domain (e.g., a deaminase domain) for editing the nucleobase; and (2) a guide polynucleotide (e.g., guide RNA) in conjunction with the polynucleotide programmable nucleotide binding domain. In some embodiments, the base editor system is a cytidine base editor (CBE) or an adenosine base editor (ABE). In some embodiments, the polynucleotide programmable nucleotide binding domain is a polynucleotide programmable DNA or RNA binding domain. In some embodiments, the nucleobase editing domain is a deaminase domain. In some embodiments, a deaminase domain can be a cytidine deaminase or an cytosine deaminase. In some embodiments, a deaminase domain can be an adenine deaminase or an adenosine deaminase. In some embodiments, the adenosine base editor can deaminate adenine in DNA. In some embodiments, the base editor is capable of deaminating a cytidine in DNA.

[0492] Use of the base editor system provided herein comprises the steps of: (a) contacting a target nucleotide sequence of a polynucleotide (e.g., double- or single stranded DNA or RNA) of a subject with a base editor system comprising a nucleobase editor (e.g., an adenosine base editor or a cytidine base editor) and a guide polynucleotide (e.g., gRNA), wherein the target nucleotide sequence comprises a targeted nucleobase pair; (b) inducing strand separation of said target region; (c) converting a first nucleobase of said target nucleobase pair in a single strand of the target region to a second nucleobase; and (d) cutting no more than one strand of said target region, where a third nucleobase complementary to the first nucleobase base is replaced by a fourth nucleobase complementary to the second nucleobase. It should be appreciated that in some embodiments, step (b) is omitted. In some embodiments, said targeted nucleobase pair is a plurality of nucleobase pairs in one or more genes. In some embodiments, the base editor system provided herein is capable of multiplex editing of a plurality of nucleobase pairs in one or more genes. In some embodiments, the plurality of nucleobase pairs is located in the same gene. In some embodiments, the plurality of nucleobase pairs is located in one or more genes, wherein at least one gene is located in a different locus.

[0493] The components of a base editor system (e.g., a deaminase domain, a guide RNA, and/or a polynucleotide programmable nucleotide binding domain) may be associated with each other covalently or non-covalently. For example, in some embodiments, the deaminase domain can be targeted to a target nucleotide sequence by a polynucleotide programmable nucleotide binding domain, optionally where the polynucleotide programmable nucleotide binding domain is complexed with a polynucleotide (e.g., a guide RNA). In some embodiments, a polynucleotide programmable nucleotide binding domain can be fused or linked to a deaminase domain. In some embodiments, a polynucleotide programmable nucleotide binding domain can target a deaminase domain to a target nucleotide sequence by non-covalently interacting with or associating with the deaminase domain. For example, in some embodiments, the nucleobase editing component (e.g., the deaminase component) comprises an additional heterologous portion or domain that is capable of interacting with, associating with, or capable of forming a complex with a corresponding heterologous portion, antigen, or domain that is part of a polynucleotide programmable nucleotide binding domain and/or a guide polynucleotide (e.g., a guide RNA) complexed therewith. In some embodiments, the polynucleotide programmable nucleotide binding domain, and/or a guide polynucleotide (e.g., a guide RNA) complexed therewith, comprises an additional heterologous portion or domain that is capable of interacting with, associating with, or capable of forming a complex with a corresponding heterologous portion, antigen, or domain that is part of a nucleobase editing domain (e.g., the deaminase component). In some embodiments, the additional heterologous portion may be capable of binding to, interacting with, associating with, or forming a complex with a polypeptide. In some embodiments, the additional heterologous portion may be capable of binding to, interacting with, associating with, or forming a complex with a polynucleotide. In some embodiments, the additional heterologous portion may be capable of binding to a guide polynucleotide. In some embodiments, the additional heterologous portion may be capable of binding to a polypeptide linker. In some embodiments, the additional heterologous portion is capable of binding to a polynucleotide linker. An additional heterologous portion may be a protein domain. In some embodiments, an additional heterologous portion comprises a polypeptide, such as a 22 amino acid RNA-binding domain of the lambda bacteriophage antiterminator protein N (N₂₂p), a 2G12 IgG homodimer domain, an ABI, an antibody (e.g. an antibody that binds a component of the base editor system or a heterologous portion thereof) or fragment thereof (e.g. heavy chain domain 2 (CH2) of IgM (MHD2) or IgE (EHD2), an immunoglobulin Fc region, a heavy chain domain 3 (CH3) of IgG or IgA, a heavy chain domain 4 (CH4) of IgM or IgE, an Fab, an Fab2, miniantibodies, and/or ZIP antibodies), a barnase-barstar dimer domain, a Bcl-XL domain, a Calcineurin A (CAN) domain, a Cardiac phospholamban transmembrane pentamer domain, a collagen domain, a Com RNA binding protein domain (e.g. SfMu Com coat protein domain, and SfMu Com binding protein domain), a Cyclophilin-Fas fusion protein (CyP-Fas) domain, a Fab domain, an Fc domain, a fibritin foldon domain, an FK506 binding protein (FKBP) domain, an FKBP binding domain (FRB) domain of mTOR, a foldon domain, a fragment X domain, a GAI domain, a GID1 domain, a Glycophorin A transmembrane domain, a GyrB domain, a Halo tag, an HIV Gp41 trimerisation domain, an HPV45 oncoprotein E7 C-terminal dimer domain, a hydrophobic polypeptide, a K Homology (KH) domain, a Ku protein domain (e.g., a Ku heterodimer), a leucine zipper, a LOV domain, a mitochondrial antiviral-signaling protein CARD filament domain, an MS2 coat protein domain (MCP), a non-natural RNA aptamer ligand that binds a corresponding RNA motif/aptamer, a parathyroid hormone dimerization domain, a PP7 coat protein (PCP) domain, a PSD95-Dlgl-zo-1 (PDZ) domain, a PYL domain, a SNAP tag, a SpyCatcher moiety, a SpyTag moiety, a streptavidin domain, a streptavidin-binding protein domain, a streptavidin binding protein (SBP) domain, a telomerase Sm7 protein domain (e.g. Sm7 homoheptamer or a monomeric Sm-like protein), and/or fragments thereof. In embodiments, an additional heterologous portion comprises a polynucleotide (e.g., an RNA motif), such as an MS2 phage operator stem-loop (e.g., an MS2, an MS2 C-5 mutant, or an MS2 F-5 mutant), a non-natural RNA motif, a PP7 operator stem-loop, an SfMu phate Com stem-loop, a steril alpha motif, a telomerase Ku binding motif, a telomerase Sm7 binding motif, and/or fragments thereof. Non-limiting examples of additional heterologous portions include polypeptides with at least about 85% sequence identity to any one or more of SEQ ID NOs: 380, 382, 384, 386-388, or fragments thereof. Non-limiting examples of additional heterologous portions include polynucleotides with at least about 85% sequence identity to any one or more of SEQ ID NOs: 379, 381, 383, 385, or fragments thereof.

[0494] In some instances, components of the base editing system are associated with one another through the interaction of leucine zipper domains (e.g., SEQ ID NOs: 387 and 388). In some cases, components of the base editing system are associated with one another through polypeptide domains (e.g., FokI domains) that associate to form protein complexes containing about, at least about, or no more than about 1, 2 (i.e., dimerize), 3, 4, 5, 6, 7, 8, 9, 10 polypeptide domain units, optionally the polypeptide domains may include alterations that reduce or eliminate an activity thereof.

[0495] In some instances, components of the base editing system are associated with one another through the interaction of multimeric antibodies or fragments thereof (e.g., IgG, IgD, IgA, IgM, IgE, a heavy chain domain 2 (CH₂) of IgM (MHD2) or IgE (EHD2), an immunoglobulin Fc region, a heavy chain domain 3 (CH₃) of IgG or IgA, a heavy chain domain 4 (CH₄) of IgM or IgE, an Fab, and an Fab2). In some instances, the antibodies are dimeric, trimeric, or tetrameric. In embodiments, the dimeric antibodies bind a polypeptide or polynucleotide component of the base editing system.

[0496] In some cases, components of the base editing system are associated with one another through the interaction of a polynucleotide-binding protein domain(s) with a polynucleotide(s). In some instances, components of the base editing system are associated with one another through the interaction of one or more polynucleotide-binding protein domains with polynucleotides that are self-complementary and/or complementary to one another so that complementary binding of the polynucleotides to one another brings into association their respective bound polynucleotide-binding protein domain(s).

[0497] In some instances, components of the base editing system are associated with one another through the interaction of a polypeptide domain(s) with a small molecule(s) (e.g., chemical inducers of dimerization (CIDs), also known as “dimerizers”). Non-limiting examples of CIDs include those disclosed in Amara, et al., “A versatile synthetic dimerizer for the regulation of protein-protein interactions,” PNAS, 94:10618-10623 (1997); and Voß, et al. “Chemically induced dimerization: reversible and spatiotemporal control of protein function in cells,” Current Opinion in Chemical Biology, 28:194-201 (2015), the disclosures of each of which are incorporated herein by reference in their entireties for all purposes. In some embodiments, the base editor inhibits base excision repair (BER) of the edited strand. In some embodiments, the base editor protects or binds the non-edited strand. In some embodiments, the base editor comprises UGI activity or USP activity. In some embodiments, the base editor comprises a catalytically inactive inosine-specific nuclease.

[0498] The base editors of the present disclosure can comprise any domain, feature or amino acid sequence which facilitates the editing of a target polynucleotide sequence. For example, in some embodiments, the base editor comprises a nuclear localization sequence (NLS). In some embodiments, an NLS of the base editor is localized between a deaminase domain and a polynucleotide programmable nucleotide binding domain. In some embodiments, an NLS of the base editor is localized C-terminal to a polynucleotide programmable nucleotide binding domain.

[0499] Protein domains included in the fusion protein can be a heterologous functional domain. Non-limiting examples of protein domains which can be included in the fusion protein include a deaminase domain (e.g., cytidine deaminase and/or adenosine deaminase), a uracil glycosylase inhibitor (UGI) domain, epitope tags, and reporter gene sequences. In some embodiments, the adenosine base editor (ABE) can deaminate adenine in DNA. In some embodiments, ABE is generated by replacing APOBEC1 component of BE3 with natural or engineered E. coli TadA, human ADAR2, mouse ADA, or human ADAT2. In some embodiments, ABE comprises an evolved TadA variant. In some embodiments, the base editor is ABE8.1, which comprises or consists essentially of the following sequence or a fragment thereof having adenosine deaminase activity: SEQ ID NO: 331. Other ABE8 sequences are provided in the attached sequence listing (SEQ ID NOs: 332-354).

[0500] In some embodiments, the base editor includes an adenosine deaminase variant comprising an amino acid sequence, which contains alterations relative to an ABE 7*10 reference sequence, as described herein. The term “monomer” as used in Table 7 refers to a monomeric form of TadA*7.10 comprising the alterations described. The term “heterodimer” as used in Table 7 refers to the specified wild-type E. coli TadA adenosine deaminase fused to a TadA*7.10 comprising the alterations as described.

TABLE 7
Adenosine Deaminase Base Editor Variants

| | Adenosine | |
|---|---|---|
| ABE | Deaminase | Adenosine Deaminase Description |
| ABE-605m | MSP605 | monomer_TadA*7.10 + V82G + Y147T + Q154S |
| ABE-680m | MSP680 | monomer_TadA*7.10 + I76Y + V82G + Y147T + Q154S |
| ABE-823m | MSP823 | monomer_TadA*7.10 + L36H + V82G + Y147T + Q154S + |
| | | N157K |
| ABE-824m | MSP824 | monomer_TadA*7.10 + V82G + Y147D + F149Y + Q154S + |
| | | D167N |
| ABE-825m | MSP825 | monomer_TadA*7.10 + L36H + V82G + Y147D + F149Y + |
| | | Q154S + N157K + D167N |
| ABE-827m | MSP827 | monomer_TadA*7.10 + L36H + I76Y + V82G + Y147T + Q154S + |
| | | N157K |
| ABE-828m | MSP828 | monomer_TadA*7.10 + I76Y + V82G + Y147D + F149Y + Q154S + |
| | | D167N |
| ABE-829m | MSP829 | monomer_TadA*7.10 + L36H + I76Y + V82G + Y147D + F149Y + |
| | | Q154S + N157K + D167N |
| ABE-605d | MSP605 | heterodimer_(WT) + (TadA*7.10 + V82G + Y147T + Q154S) |
| ABE-680d | MSP680 | heterodimer_(WT) + (TadA*7.10 + I76Y + V82G + Y147T + |
| | | Q154S) |
| ABE-823d | MSP823 | heterodimer_(WT) + (TadA*7.10 + L36H + V82G + Y147T + |
| | | Q154S + N157K) |
| ABE-824d | MSP824 | heterodimer_(WT) + (TadA*7.10 + V82G + Y147D + F149Y + |
| | | Q154S + D167N) |
| ABE-825d | MSP825 | heterodimer_(WT) + (TadA*7.10 + L36H + V82G + Y147D + |
| | | F149Y + Q154S + N157K + D167N) |
| ABE-827d | MSP827 | heterodimer_(WT) + (TadA*7.10 + L36H + I76Y + V82G + Y147T + |
| | | Q154S + N157K) |
| ABE-828d | MSP828 | heterodimer_(WT) + (TadA*7.10 + I76Y + V82G + Y147D + |
| | | F149Y + Q154S + D167N) |
| ABE-829d | MSP829 | heterodimer_(WT) + (TadA*7.10 + L36H + I76Y + V82G + Y147D + |
| | | F149Y + Q154S + N157K + D167N) |

[0501] In some embodiments, the base editor comprises a domain comprising all or a portion (e.g., a functional portion) of a uracil glycosylase inhibitor (UGI) or a uracil stabilizing protein (USP) domain.

### Linkers

[0502] In certain embodiments, linkers may be used to link any of the peptides or peptide domains of the disclosure. The linker may be as simple as a covalent bond, or it may be a polymeric linker many atoms in length. In certain embodiments, the linker is a polypeptide or based on amino acids. In other embodiments, the linker is not peptide-like. In certain embodiments, the linker is a covalent bond (e.g., a carbon-carbon bond, disulfide bond, carbon-heteroatom bond, etc.).

[0503] In some embodiments, any of the fusion proteins provided herein, comprise a cytidine or adenosine deaminase and a Cas9 domain that are fused to each other via a linker. Various linker lengths and flexibilities between the cytidine or adenosine deaminase and the Cas9 domain can be employed (e.g., ranging from very flexible linkers of the form (GGGS) n (SEQ ID NO: 246), (GGGGS) n (SEQ ID NO: 247), and (G) n to more rigid linkers of the form (EAAAK) n (SEQ ID NO: 248), (SGGS) n (SEQ ID NO: 355), SGSETPGTSESATPES(SEQ ID NO: 249) (see, e.g., Guilinger JP, et al. Fusion of catalytically inactive Cas9 to FokI nuclease improves the specificity of genome modification. Nat. Biotechnol. 2014; 32 (6): 577-82; the entire contents are incorporated herein by reference) and (XP) n) in order to achieve the optimal length for activity for the cytidine or adenosine deaminase nucleobase editor. In some embodiments, n is 1, 2, 3, 4, 5, 6, 7, 8, 9, 10, 11, 12, 13, 14, or 15. In some embodiments, the linker comprises a (GGS) n motif, wherein n is 1, 3, or 7. In some embodiments, cytidine deaminase or adenosine deaminase and the Cas9 domain of any of the fusion proteins provided herein are fused via a linker comprising the amino acid sequence SGSETPGTSESATPES(SEQ ID NO: 249), which can also be referred to as the XTEN linker.

[0504] In some embodiments, the domains of the base editor are fused via a linker that comprises the amino acid sequence of:

(SEQ ID NO: 356)
SGGSSGSETPGTSESATPESSGGS,
(SEQ ID NO: 357)
SGGSSGGSSGSETPGTSESATPESSGGSSGGS,
or
(SEQ ID NO: 358)
GGSGGSPGSPAGSPTSTEEGTSESATPESGPGTSTEPSEGSAPGSPAGSP
TSTEEGTSTEPSEGSAPGTSTEPSEGSAPGTSESATPESGPGSEPATSGG
SGGS.

[0505] In some embodiments, domains of the base editor are fused via a linker comprising the amino acid sequence SGSETPGTSESATPES(SEQ ID NO: 249), which may also be referred to as the XTEN linker. In some embodiments, a linker comprises the amino acid sequence SGGS(SEQ ID NO: 355). In some embodiments, the linker is 24 amino acids in length. In some embodiments, the linker comprises the amino acid sequence SGGSSGGSSGSETPGTSESATPES(SEQ ID NO: 359). In some embodiments, the linker is 40 amino acids in length. In some embodiments, the linker comprises the amino acid sequence: SGGSSGGSSGSETPGTSESATPESSGGSSGGSSGGSSGGS(SEQ ID NO: 360). In some embodiments, the linker is 64 amino acids in length. In some embodiments, the linker comprises the amino acid sequence: SGGSSGGSSGSETPGTSESATPESSGGSSGGSSGGSSGGSSGSETPGTSESATPESSGGSSG GS(SEQ ID NO: 361). In some embodiments, the linker is 92 amino acids in length. In some embodiments, the linker comprises the amino acid sequence:

(SEQ ID NO: 362)
PGSPAGSPTSTEEGTSESATPESGPGTSTEPSEGSAPGSPAGSPTSTEEG
TSTEPSEGSAPGTSTEPSEGSAPGTSESATPESGPGSEPATS.

[0506] In some embodiments, a linker comprises a plurality of proline residues and is 5-21, 5-14, 5-9, 5-7 amino acids in length, e.g., PAPAP(SEQ ID NO: 363), PAPAPA (SEQ ID NO: 364), PAPAPAP(SEQ ID NO: 365), PAPAPAPA (SEQ ID NO: 366), P(AP)₄ (SEQ ID NO: 367), P(AP)₇ (SEQ ID NO: 368), P(AP)₁₀ (SEQ ID NO: 369) (see, e.g., Tan J, Zhang F, Karcher D, Bock R. Engineering of high-precision base editors for site-specific single nucleotide replacement. Nat Commun. 2019 Jan. 25;10 (1): 439; the entire contents are incorporated herein by reference). Such proline-rich linkers are also termed “rigid” linkers.

Nucleic Acid Programmable DNA Binding Proteins with Guide RNAs

[0507] Provided herein are compositions and methods for base editing in cells. Further provided herein are compositions comprising a guide polynucleotide sequence, e.g., a guide RNA sequence, or a combination of 2, 3, 4, 5, 6, 7, 8, 9, 10, 11, 12, 13, 14, 15, 16, 17, 18, 19, 20, or more guide RNAs as provided herein. In some embodiments, a composition for base editing as provided herein further comprises a polynucleotide that encodes a base editor, e.g., a C-base editor or an A-base editor. For example, a composition for base editing may comprise a mRNA sequence encoding a BE, a BE4, an ABE, and a combination of one or more guide RNAs as provided. A composition for base editing may comprise a base editor polypeptide and a combination of one or more of any guide RNAs provided herein. Such a composition may be used to effect base editing in a cell through different delivery approaches, for example, electroporation, nucleofection, viral transduction or transfection. In some embodiments, the composition for base editing comprises an mRNA sequence that encodes a base editor and a combination of one or more guide RNA sequences provided herein for electroporation.

[0508] Some aspects of this disclosure provide systems comprising any of the fusion proteins or complexes provided herein, and a guide RNA bound to a nucleic acid programmable DNA binding protein (napDNAbp) domain (e.g., a Cas9 (e.g., a dCas9, a nuclease active Cas9, or a Cas9 nickase) or Cas12) of the fusion protein or complex. These complexes are also termed ribonucleoproteins (RNPs). In some embodiments, the guide nucleic acid (e.g., guide RNA) is from 15-100 nucleotides long and comprises a sequence of at least 10 contiguous nucleotides that is complementary to a target sequence. In some embodiments, the target sequence is a DNA sequence. In some embodiments, the target sequence is an RNA sequence. In some embodiments, the target sequence is a sequence in the genome of a bacteria, yeast, fungi, insect, plant, or animal. In some embodiments, the target sequence is a sequence in the genome of a human. In some embodiments, the 3′ end of the target sequence is immediately adjacent to a canonical PAM sequence (NGG). In some embodiments, the 3′ end of the target sequence is immediately adjacent to a non-canonical PAM sequence (e.g., a sequence listed in Table 3 or 5′—NAA-3′). In some embodiments, the guide nucleic acid (e.g., guide RNA) is complementary to a sequence in a gene of interest (e.g., a gene associated with a disease or disorder).

[0509] Some aspects of this disclosure provide methods of using the fusion proteins, or complexes provided herein. For example, some aspects of this disclosure provide methods comprising contacting a DNA molecule with any of the fusion proteins or complexes provided herein, and with at least one guide RNA, wherein the guide RNA is about 15-100 nucleotides long and comprises a sequence of at least 10 contiguous nucleotides that is complementary to a target sequence.

[0510] The domains of the base editor disclosed herein can be arranged in any order.

[0511] A defined target region can be a deamination window. A deamination window can be the defined region in which a base editor acts upon and deaminates a target nucleotide. In some embodiments, the deamination window is within a 2, 3, 4, 5, 6, 7, 8, 9, or 10 base regions. In some embodiments, the deamination window is 5, 6, 7, 8, 9, 10, 11, 12, 13, 14, 15, 16, 17, 18, 19, 20, 21, 22, 23, 24, or 25 bases upstream of the PAM.

[0512] The base editors of the present disclosure can comprise any domain, feature or amino acid sequence which facilitates the editing of a target polynucleotide sequence.

### Methods of Using Fusion Proteins or Complexes Comprising a Cytidine or Adenosine Deaminase and a Cas9 Domain

[0513] Some aspects of this disclosure provide methods of using the fusion proteins, or complexes provided herein. For example, some aspects of this disclosure provide methods comprising contacting a DNA molecule with any of the fusion proteins or complexes provided herein, and with at least one guide RNA described herein.

[0514] In some embodiments, a fusion protein or complex of the disclosure is used for editing a target gene of interest. In particular, a cytidine deaminase or adenosine deaminase nucleobase editor described herein is capable of making multiple mutations within a target sequence. These mutations may affect the function of the target. For example, when a cytidine deaminase or adenosine deaminase nucleobase editor is used to target a regulatory region the function of the regulatory region is altered and the expression of the downstream protein is reduced or eliminated.

### Base Editor Efficiency

[0515] In some embodiments, the purpose of the methods provided herein is to alter a gene and/or gene product via gene editing. The nucleobase editing proteins provided herein can be used for gene editing-based human therapeutics in vitro or in vivo. It will be understood by the skilled artisan that the nucleobase editing proteins provided herein, e.g., the fusion proteins or complexes comprising a polynucleotide programmable nucleotide binding domain (e.g., Cas9) and a nucleobase editing domain (e.g., an adenosine deaminase domain or a cytidine deaminase domain) can be used to edit a nucleotide from A to Gor C to T.

[0516] Advantageously, base editing systems as provided herein provide genome editing without generating double-strand DNA breaks, without requiring a donor DNA template, and without inducing an excess of stochastic insertions and deletions as CRISPR may do. In some embodiments, the present disclosure provides base editors that efficiently generate an intended mutation, such as a STOP codon, in a nucleic acid (e.g., a nucleic acid within a genome of a subject) without generating a significant number of unintended mutations, such as unintended point mutations.

[0517] The base editors of the disclosure advantageously modify a specific nucleotide base encoding a protein without generating a significant proportion of indels (i.e., insertions or deletions). Such indels can lead to frame shift mutations within a coding region of a gene.

[0518] In some embodiments, the base editors provided herein are capable of generating a ratio of intended mutations to indels (i.e., intended point mutations: unintended point mutations) that is greater than 1:1. In some embodiments, the base editors provided herein are capable of generating a ratio of intended mutations to indels that is at least 1.5:1, at least 2:1, at least 2.5:1, at least 3:1, at least 3.5:1, at least 4:1, at least 4.5:1, at least 5:1, at least 5.5:1, at least 6:1, at least 6.5:1, at least 7:1, at least 7.5:1, at least 8:1, at least 10:1, at least 12:1, at least 15:1, at least 20:1, at least 25:1, at least 30:1, at least 40:1, at least 50:1, at least 100:1, at least 200:1, at least 300:1, at least 400:1, at least 500:1, at least 600:1, at least 700:1, at least 800:1, at least 900:1, or at least 1000:1, or more. The number of intended mutations and indels may be determined using any suitable method.

[0519] In some embodiments, the base editors provided herein can limit formation of indels in a region of a nucleic acid. In some embodiments, the region is at a nucleotide targeted by a base editor or a region within 2, 3, 4, 5, 6, 7, 8, 9, or 10 nucleotides of a nucleotide targeted by a base editor. In some embodiments, any of the base editors provided herein can limit the formation of indels at a region of a nucleic acid to less than 1%, less than 1.5%, less than 2%, less than 2.5%, less than 3%, less than 3.5%, less than 4%, less than 4.5%, less than 5%, less than 6%, less than 7%, less than 8%, less than 9%, less than 10%, less than 12%, less than 15%, or less than 20%.

[0520] Base editing is often referred to as a “modification”, such as, a genetic modification, a gene modification and modification of the nucleic acid sequence and is clearly understandable based on the context that the modification is a base editing modification. A base editing modification is therefore a modification at the nucleotide base level, for example as a result of the deaminase activity discussed throughout the disclosure, which then results in a change in the gene sequence and may affect the gene product.

[0521] In some embodiments, the modification, e.g., single base edit results in about or at least about a 10%, 15%, 20%, 25%, 30%, 35%, 40%, 45%, 50%, 55%, 60%, 65%, 70%, 75%, 80%, 85%, 90%, 95%, 99%, or 100% reduction, or reduction to an undetectable level, of the gene targeted expression.

[0522] The disclosure provides adenosine deaminase variants (e.g., ABE8 variants) that have increased efficiency and specificity. In particular, the adenosine deaminase variants described herein are more likely to edit a desired base within a polynucleotide and are less likely to edit bases that are not intended to be altered (e.g., “bystanders”).

[0523] In some embodiments, any of the base editing system comprising one of the ABE8 base editor variants described herein has reduced bystander editing or mutations by at least 1%, 2%, 3%, 4%, 5%, 10%, 15%, 20%, 25%, 30%, 35%, 40%, 45%, 50%, 55%, 60%, 65%, 70%, 75%, 80%, 85%, 90%, 95%, or 99% compared to a base editor system comprising an ABE7 base editor, e.g., ABE7.10.

[0524] In some embodiments, any of the ABE8 base editor variants described herein has higher base editing efficiency compared to the ABE7 base editors. In some embodiments, any of the ABE8 base editor variants described herein have at least 1%, 2%, 3%, 4%, 5%, 10%, 15%, 20%, 25%, 30%, 35%, 40%, 45%, 50%, 55%, 60%, 65%, 70%, 75%, 80%, 85%, 90%, 95%, 99%, 100%, 105%, 110%, 115%, 120%, 125%, 130%, 135%, 140%, 145%, 150%, 155%, 160%, 165%, 170%, 175%, 180%, 185%, 190%, 195%, 200%, 210%, 220%, 230%, 240%, 250%, 260%, 270%, 280%, 290%, 300%, 310%, 320%, 330%, 340%, 350%, 360%, 370%, 380%, 390%, 400%, 450%, or 500% higher base editing efficiency compared to an ABE7 base editor, e.g., ABE7.10.

[0525] The ABE8 base editor variants described herein may be delivered to a host cell via a plasmid, a vector, a LNP complex, or an mRNA. In some embodiments, any of the ABE8 base editor variants described herein is delivered to a host cell as an mRNA.

[0526] In some embodiments, the method described herein, for example, the base editing methods has minimum to no off-target effects. In some embodiments, the method described herein, for example, the base editing methods, has minimal to no chromosomal translocations.

[0527] In some embodiments, the base editing method described herein results in about 91%, 92%, 93%, 94%, 95%, 96%, 97%, 98%, 99% or 100% of a cell population that have been successfully edited.

[0528] In some embodiments, the percent of viable cells in a cell population following a base editing intervention is greater than at least 60%, 70%, 80%, or 90% of the starting cell population at the time of the base editing event. In some embodiments, the percent of viable cells in a cell population following editing is about 70%. In some embodiments, the percent of viable cells in a cell population following editing is about 75%. In some embodiments, the percent of viable cells in a cell population following editing is about 80%. In some embodiments, the percent of viable cells in a cell population as described above is about 85%. In some embodiments, the percent of viable cells in a cell population as described above is about 90%, or about 91%, 92%, 93%, 94% 95%, 96%, 97%, 98%, 99%, or 100% of the cells in the population at the time of the base editing event.

[0529] In embodiments, the cell population is a population of cells contacted with a base editor, complex, or base editor system of the present disclosure.

[0530] The number of intended mutations and indels can be determined using any suitable method, for example, as described in International PCT Application Nos. PCT/US2017/045381 (WO2018/027078) and PCT/US2016/058344 (WO2017/070632); Komor, A. C., et al., “Programmable editing of a target base in genomic DNA without double-stranded DNA cleavage” Nature 533, 420-424 (2016); Gaudelli, N.M., et al., “Programmable base editing of A.T to G.C in genomic DNA without DNA cleavage” Nature 551, 464-471 (2017); and Komor, A. C., et al., “Improved base excision repair inhibition and bacteriophage Mu Gam protein yields C: G-to-T: A base editors with higher efficiency and product purity” Science Advances 3: eaao4774 (2017); the entire contents of which are hereby incorporated by reference.

[0531] In some embodiments, to calculate indel frequencies, sequencing reads are scanned for exact matches to two 10-bp sequences that flank both sides of a window in which indels can occur. If no exact matches are located, the read is excluded from analysis. If the length of this indel window exactly matches the reference sequence the read is classified as not containing an indel. If the indel window is two or more bases longer or shorter than the reference sequence, then the sequencing read is classified as an insertion or deletion, respectively. In some embodiments, the base editors provided herein can limit formation of indels in a region of a nucleic acid. In some embodiments, the region is at a nucleotide targeted by a base editor or a region within 2, 3, 4, 5, 6, 7, 8, 9, or 10 nucleotides of a nucleotide targeted by a base editor.

### Multiplex Editing

[0532] In some embodiments, the base editor system provided herein is capable of multiplex editing of a plurality of nucleobase pairs in one or more genes or polynucleotide sequences. In some embodiments, the plurality of nucleobase pairs is located in the same gene or in one or more genes, wherein at least one gene is located in a different locus. In some embodiments, the multiplex editing comprises one or more guide polynucleotides. In some embodiments, the multiplex editing comprises one or more base editor systems. In some embodiments, the multiplex editing comprises one or more base editor systems with a single guide polynucleotide or a plurality of guide polynucleotides. In some embodiments, the multiplex editing comprises one or more guide polynucleotides with a single base editor system. It should be appreciated that the characteristics of the multiplex editing using any of the base editors as described herein can be applied to any combination of methods using any base editor provided herein. It should also be appreciated that the multiplex editing using any of the base editors as described herein can comprise a sequential editing of a plurality of nucleobase pairs.

[0533] In some embodiments, the base editor system capable of multiplex editing of a plurality of nucleobase pairs in one or more genes comprises one of ABE7, ABE8, and/or ABE9 base editors.

### Delivery Systems

### Nucleic Acid-Based Delivery of Base Editor Systems

[0534] Nucleic acid molecules encoding a base editor system according to the present disclosure can be administered to subjects or delivered into cells in vitro or in vivo by art-known methods or as described herein. For example, a base editor system comprising a deaminase (e.g., cytidine or adenine deaminase) can be delivered by vectors (e.g., viral or non-viral vectors), or by naked DNA, DNA complexes, lipid nanoparticles, or a combination of the aforementioned compositions. A base editor system may be delivered to a cell using any methods available in the art including, but not limited to, physical methods (e.g., electroporation, particle gun, calcium phosphate transfection), viral methods, non-viral methods (e.g., liposomes, cationic methods, lipid nanoparticles, polymeric nanoparticles), or biological non-viral methods (e.g., attenuated bacterial, engineered bacteriophages, mammalian virus-like particles, biological liposomes, erythrocyte ghosts, exosomes).

[0535] Nanoparticles, which can be organic or inorganic, are useful for delivering a base editor system or component thereof. Nanoparticles are well known in the art and any suitable nanoparticle can be used to deliver a base editor system or component thereof, or a nucleic acid molecule encoding such components. In one example, organic (e.g., lipid and/or polymer) nanoparticles are suitable for use as delivery vehicles in certain embodiments of this disclosure. Non-limiting examples of lipid nanoparticles suitable for use in the methods of the present disclosure include those described in International Patent Application Publications No. WO2022140239, WO2022140252, WO2022140238, WO2022159421, WO2022159472, WO2022159475, WO2022159463, WO2021113365, and WO2021141969, the disclosures of each of which is incorporated herein by reference in its entirety for all purposes.

### Lipid Nanoparticle (LNP)Compositions

[0536] The pharmaceutical compositions for gene modification described herein may be encapsulated in lipid nanoparticles (LNP). As used herein, a “lipid nanoparticle (LNP) composition” or a “nanoparticle composition” is a composition comprising one or more described lipids. LNP compositions or formulations, as contemplated herein, are typically sized on the order of micrometers or smaller and may include a lipid bilayer. Nanoparticle compositions encompass lipid nanoparticles (LNPs), liposomes (e.g., lipid vesicles), and lipoplexes. For example, a nanoparticle composition or formulation as contemplated herein may be a liposome having a lipid bilayer with a diameter of 500 nm or less. A LNP as described herein may have a mean diameter of from about 1 nm to about 2500 nm, from about 10 nm to about 1500 nm, from about 20 nm to about 1000 nm, from about 30 nm to about 150 nm, from about 40 nm to about 150 nm, from about 50 nm to about 150 nm, from about 60 nm to about 130 nm, from about 50 nm to 90 nm, from about 55 nm to 85 nm, from about 55 nm to 75 nm, from about 50 nm to about 80 nm, from about 60 nm to about 80 nm, from about 70 nm to about 110 nm, from about 70 nm to about 100 nm, from about 80 nm to about 100 nm, from about 90 nm to about 100 nm, from about 70 to about 90 nm, from about 80 nm to about 90 nm, or from about 70 nm to about 80 nm. The LNPs described herein can have a mean diameter of about 30 nm, 35 nm, 40 nm, 45 nm, 50 nm, 55 nm, 60 nm, 65 nm, 70 nm, 75 nm, 80 nm, 85 nm, 90 nm, 95 nm, 100 nm, 105 nm, 110 nm, 115 nm, 120 nm, 125 nm, 130 nm, 135 nm, 140 nm, 145 nm, 150 nm, or greater. In one embodiment the mean diameter of the LNP is about 70 nm +/−20 nm, 70 nm +/−10 nm, 70 nm +/−5 nm. The LNPs described herein can be substantially non-toxic.

[0537] Lipid nanoparticles and components thereof suitable for use in embodiments of the present disclosure include those disclosed in any of International Patent Application Publications No. WO 2022/140239, WO 2022/140252, WO 2022/140238, WO 2022/159421, WO 2022/159472, WO 2022/159475, WO 2022/159463, WO 2021/113365, and WO 2021/141969, the disclosures of each of which are incorporated herein by reference in their entireties for all purposes.

[0538] Lipid nanoparticles (LNPs) employ a non-viral drug delivery mechanism that is capable of passing through blood vessels and reaching hepatocytes [Am. J. Pathol. 2010, 176,14-21]. Apolipoprotein E (ApoE) proteins are capable of binding to the LNPs post PEG-lipid diffusion from the LNP surface with a near neutral charge in the blood stream, and thereby function as an endogenous ligand against hepatocytes, which express the low-density lipoprotein receptor (LDLr) [Mol. Ther., 2010, 18, 1357-1364.]. Control the efficient hepatic delivery of LNP include: 1) effective PEG-lipid shedding from LNP surface in blood serum and 2) ApoE binding to the LNP. Endogenous ApoE-mediated LDLr-dependent LNP delivery route is unavailable or less effective path to achieve LNP-based hepatic gene delivery in patient populations that LDLr deficient.

[0539] Efficient delivery to cells requires specific targeting and substantial protection from the extracellular environment, particularly serum proteins. One method of achieving specific targeting is to conjugate a targeting moiety to an active agents or pharmaceutical effector such as a nucleic acid agent, thereby directing the active agent or pharmaceutical effector to particular cells or tissues depending on the specificity of the targeting moiety. One way a targeting moiety can improve delivery is by receptor mediated endocytotic activity. This mechanism of uptake involves the movement of nucleic acid agent bound to membrane receptors into the interior of an area that is enveloped by the membrane via invagination of the membrane structure or by fusion of the delivery system with the cell membrane. This process is initiated via activation of a cell surface or membrane receptor following binding of a specific ligand to the receptor. Receptor-mediated endocytotic systems include those that recognize sugars such as galactose, mannose, mannose-6-phosphate, peptides and proteins such as transferrin, asialoglycoprotein, vitamin B12, insulin and epidermal growth factor (EGF). Lipophilic moieties, such as cholesterol or fatty acids, when attached to highly hydrophilic molecules such as nucleic acids can substantially enhance plasma protein binding and consequently circulation half-life. Lipophilic conjugates can also be used in combination with the targeting ligands in order to improve the intracellular trafficking of the targeted delivery approach.

[0540] The Asialoglycoprotein receptor (ASGP-R) is a high-capacity receptor, which is abundant on hepatocytes. The ASGP-R shows a 50-fold higher affinity for N-Acetyl-D-Galactosylamine (GalNAc) than D-Gal. LNPs comprising receptor targeting conjugates, may be used to facilitate targeted delivery of the drug substances described herein. The LNPs may include one or more receptor targeting moiety on the surface or periphery of the particle at specified or engineered surface density ranging from relatively low to relatively high surface density. The receptor targeting conjugate may comprise a targeting moiety (or ligand), a linker, and a lipophilic moiety that is connected to the targeting moiety. In some embodiments, the receptor targeting moiety (or ligand) targets a lectin receptor. In some embodiments, the lectin receptor is asialoglycoprotein receptor (ASGPR). In some embodiments the receptor targeting moiety is GalNAc or a derivative GalNAc that targets ASGPR. In one aspect the receptor targeting conjugate comprises of one GalNAc moiety or derivative thereof. In another aspect, the receptor targeting conjugate comprises of two different GalNAc moieties or derivative thereof. In another aspect, the receptor targeting conjugate comprises of three different GalNAc moieties or derivative thereof. In another aspect, the receptor targeting conjugate is lipophilic. In some embodiments, the receptor targeting conjugate comprises one or more GalNAc moieties and one or more lipid moieties, i.e., GalNAc-Lipid. In some embodiments, the receptor targeting conjugate is a GalNAc-Lipid.

[0541] Described herein are (i) LNP compositions comprising an amino lipid, a phospholipid, a PEG lipid, a cholesterol, or a derivative thereof, a payload, or any combination thereof and (ii) LNP compositions comprising an amino lipid, a phospholipid, a PEG-lipid, a cholesterol, a GalNAc-Lipid or a derivative thereof, a payload, or any combination thereof. Each component is described in more detail below.

[0542] In the preparation of LNP compositions comprising the excipients amino lipid, phospholipid, PEG-Lipid and cholesterol, a desired molar ratio of the four excipients is dissolved in a water miscible organic solvent, ethanol for example. The homogenous lipid solution is then rapidly in-line mixed with an aqueous buffer with acidic pH ranging from 4 to 6.5 containing nucleic acid payload to form the lipid nanoparticle (LNP) encapsulating the nucleic acid payload(s). After rapid in-line mixing the LNPs thus formed undergo further downstream processing including concentration and buffer exchange to achieve the final LNP pharmaceutical composition with near neutral pH for administration into cell line or animal diseases model for evaluation, or to administer to human subjects.

[0543] For the preparation of GalNAc-LNP pharmaceutical composition the GalNAc-Lipid is mixed with the four lipid excipients in the water miscible organic solvent prior to the preparation of the GalNAc-LNP. The preparation of the GalNAc-LNP pharmaceutical composition then follow the same steps as described for the LNP pharmaceutical composition. The mol % of the GalNAc-Lipid in the GalNAc-LNP preparation ranges from 0.001 to 2.0 of the total excipients.

[0544] For both LNP and GalNAc-LNP preparation the payload comprises of a guide RNA targeting the TTR gene and an mRNA encoding a base editor protein. In some embodiments, the guide RNA to mRNA ratio in the acidic aqueous buffer and in the final formulation is 6:1, 5:1, 4:1, 3:1, 2.5:1, 2:1, 1.5:1, 1:1, 1:1.5, 1:2, 1:2.5, 1:3, 1:5 or 1:6 by wight. In some embodiment the said mRNA encodes adenosine base editor protein. In some other embodiments the said mRNA encodes cytosine or cytidine base editor protein.

[0545] In some embodiments, an LNP composition may be prepared as described in U.S. patent application Ser. No. 17/192,709, entitled COMPOSITIONS AND METHODS FOR TARGETED RNA DELIVERY, filed on 4 Mar. 2021, claiming the benefit of U.S. Provisional Patent Application Nos. 62/984,866 (filed on 4 Mar. 2020) and 63/078,982 (filed on 16 Sep. 2020), naming Kallanthottathil G. Rajeev as an inventor and Verve Therapeutics, Inc. as the applicant, which application is hereby incorporated herein by reference in its entirety.

### Amino Lipids

[0546] In some embodiments, the LNP composition comprises an amino lipid. In some embodiments, the cationic lipid is an ionizable lipid. In some embodiments, the amino lipid (e.g., an ionizable lipid) is a cationic lipid. In some embodiments, the amino lipid (e.g., an ionizable and/or cationic lipid) comprises one or more nitrogen atoms. Exemplary, non-limiting amino lipids suitable for the compositions described herein include those described herein.

### Formula (I)

[0547] In one aspect, disclosed herein is an amino lipid having the structure of Formula (I), or a pharmaceutically acceptable salt or solvate thereof,

[chemical structure]

wherein
[0548] each of R¹ and R² is independently C₃-C₂₂ alkyl, C₃-C₂₂ alkenyl, C₃-C₈ cycloalkyl, —

[0549] C₂-C₁₀ allkylene-L-R⁶, or

[chemical structure]

wherein each of the alkyl, alkylene, alkenyl, and cycloalkyl is independently substituted or unsubstituted;
[0550] each of X, Y, and Z is independently —C(═O)NR⁴—, —NR⁴C(═O)—, —C(═O)O—, —OC(═O)—, —OC(═O)O—, —NR⁴C(═O)O—, —OC(═O)NR⁴—, —NR⁴C(═O)NR⁴—, —NR⁴C(═NR⁴)NR⁴—, —C(═S)NR⁴—, —NR⁴° C. (═S)—, —C(═O)O—, —OC(═S)—, OC(═S)O—, —NR⁴C(═S)O—, —OC(═S)NR⁴—, —NR⁴C(═S)NR⁴—, —C(═O)S—, —SC(═O)—, —OC(═O)S—, —NR⁴C(═O)S—, —SC(═O)NR⁴—, —C(═S)S—, —SC(═S)—, —SC(═S)O—, —NR⁴C(═S)S—, —SC(═S)NR⁴—, —C(═S)S—, —SC(═S)—, —SC(═O)S—, —SC(═S)S—, —NR⁴C(═S)S—, —SC(═S)NR⁴—O, S, or a bond;
[0551] each of L is independently-C(═O)NR⁴—, —NR⁴° C. (═O)—, —C(═O)O—, —OC(═O)O—, —NR⁴C(═O)O—, —OC(═O)NR⁴—, —NR⁴C(═O)NR⁴—, —NR⁴C(═NR⁴)NR⁴—, —C(═S)NR⁴—, —NR⁴C(═S)—, —C(═O)O—, —OC(═S)—, OC(═S)O—, —NR⁴C(═S)O—, —OC(═S)NR⁴—, —NR⁴C(═S)NR⁴—, —C(═O)S—, SC(═O)—, —OC(═O)S—, —NR⁴C(═O)S—, —SC(═O)NR⁴—, —C(═S)S—, —SC(═S)—, —SC(═S)O—, —NR⁴C(═S)S—, —SC(═S)NR⁴—, —C(═S)S—, —SC(═S)—, —SC(═O)S—, —SC(═S)S—, —NR⁴C(═S)S—, —SC(═S)NR⁴—, O, S, —C₁-C₁₀ alkylene-O—, —C₁-C₁₀ alkylene-C(═O)O—, —C₁-C₁₀ alkylene-OC(═O)—, or a bond, wherein the alkylene is substituted or unsubstituted;
[0552] R³ is —C₀-C₁₀ alkylene —NR⁷R⁸, —C₀-C₁₀ alkylene-heterocycloalkyl, or —C₀-C₁₀ alkylene-heterocycloaryl, wherein the alkylene, heterocycloalkyl and heterocycloaiyl is independently substituted or unsubstituted; each of R⁴ is independently hydrogen or substituted or unsubstituted C₁-C₆ alkyl;
[0553] R⁵ is hydrogen or substituted or unsubstituted C₁-C₆ alkyl;
[0554] each of R⁶ is independently substituted or unsubstituted C₃-C₂₂ alkyl or substituted or unsubstituted C₃-C₂₂ alkenyl;
[0555] each of R⁷ and R⁸ is independently hydrogen or substituted or unsubstituted C₁-C₆ alkyl, or R⁷ and R⁸ taken together with the nitrogen to which they are attached form a substituted or unsubstituted C₂-C₆ heterocyclyl;
[0556] p is an integer selected from 1 to 10; and
[0557] each of n, m, and q is independently 0, 1, 2, 3, 4, or 5.

[0558] In some embodiments of Formula (I), if the structure carries more than one asymmetric C-atom, each asymmetric C-atom independently represents racemic, chirally pure R and/or chirally pure S isomer, or a combination thereof.

[0559] In some embodiments, each of n, in, and q in Formula (I) is independently 0, 1, 2, or 3. In some embodiments, each of n, m, and q in Formula (I) is 1.

### Formula (Ia)

[0560] In some embodiments, the compound of Formula (I) has a structure of Formula (Ia), or a pharmaceutically acceptable salt or pharmaceutically acceptable solvate thereof:

[chemical structure]

wherein
[0561] each of R¹ and R² is independently C₃-C₂₂ alkyl, C₃-C₂₂ alkenyl, C₃-C₈ cycloalkyl, —C₂-C₁₀ alkylene-L-R⁶, or

[chemical structure]

wherein each of the alkyl, alkylene, alkenyl, and cycloalkyl is independently substituted or unsubstituted;
[0562] each of X, Y, and Z is independently C(═O)NR⁴—, —NR⁴C(D)—, —C(═O)O—, —OC(═O)—, —OC(═O)O—, —NR⁴C(═O)O—, —OC(═O)NR⁴—, —NR⁴C═O)NR⁴—, —NR⁴C(═NR⁴)NR⁴—, —C(═S)NR⁴—, —NR⁴C(═S)—, —C(E)O—, —OC(═S)—, OC(═S)O—, —NR⁴C(═S)O—, —OC(═S)NR⁴—, —NR⁴C(═S)NR⁴—, —C(═O)S—, —SC(═O)—, —OC(═O)S—, —NR⁴C(═O)S—, —SC(═O)NR⁴—, —C(═S)S—, —SC(═S)—, —SC(═S)O—, —NR⁴C(═S)S—, —SC(═S)NR⁴—, —C(═S)S—, —SC(═S)—, —SC(═O)S—, —SC(═S)S—, —NR⁴C(═S)S—, —SC(═S)NR⁴—, O, S, —C₁-C₁₀ alkylene-O—, or a bond, wherein the alkylene is substituted or unsubstituted;
[0563] each of L is independently —C(═O)NR⁴—, —NR⁴C(═O)—, —C(═O)O—, —OC(═O)—, —OC(═O)O—, —NR⁴C(═O)O—, —OC(═O)NR⁴—, —NR⁴C(═O)NR⁴—, —NR⁴° C. (═NR⁴)NR⁴—, —C(═S)NR⁴—, —NR⁴° C. (═S)—, —C(═O)O—, —OC(═S)—, OC(═S)O—, —NR⁴C(═S)O—, —OC(═S)NR⁴—, —NR⁴C(═S)NR⁴—, —C(═O)S—, —SC(═O)—, —OC(═O)S—, —NR⁴C(═O)S—, —SC(═O)NR⁴—, —C(═S)S—, —SC(═S)—, —SC(═S)O—, —NR⁴C(═S)S—, —SC(═S)NR⁴—, —C(═S)S—, —SC(═S)—, —SC(═O)S—, —SC(═S)S—, —NR⁴C(═S)S—, —SC(═S)NR⁴—, O, S, —C₁-C₁₀ alkylene-O—, —C₁-C₁₀ alkylene-C(═O)O—, —C₁-C₁₀ alkylene-OC(═O)—, or a bond, wherein the alkylene is substituted or unsubstituted;
[0564] R³ is —C₀-C₁₀ alkylene-NR⁷R⁸, —C₀-C₁₀ alkylene-heterocycloalkyl, or —C₀-C₁₀ alkylene-heterocyclowyl, wherein the alkylene, heterocycloalkyl and heterocycloaryl is independently substituted or unsubstituted;
[0565] each of R⁴ is independently hydrogen or substituted or unsubstituted C₁-C₆ alkyl;
[0566] R⁵ is hydrogen or substituted or unsubstituted C₁-C₆ alkyl;
[0567] each of R⁶ is independently substituted or unsubstituted C₃-C₂₂ alkyl or substituted or unsubstituted C₃-C₂₂ alkenyl;
[0568] each of R⁷ and R⁸ is independently hydrogen or substituted or unsubstituted C₁-C₆ alkyl, or R⁷ and R⁸ taken together with the nitrogen to which they are attached form a substituted or unsubstituted C₂-C₆ heterocyclyl; and
[0569] p is an integer selected from 1 to 10.

[0570] In some embodiments of Formula (Ia), if the structure carries more than one asymmetric C-atom, each asymmetric C-atom independently represents racemic, chirally pure R and/or chirally pure S isomer, or a combination thereof.

### Variations of Formula (I) and (Ia)

[0571] In some embodiments, R¹ and R² in Formula (I) and Formula (Ia) is independently C₃-C₂₂ alkyl, C₃-C₂₂ alkenyl, —C₂-C₁₀ alkylene-L-R⁶, or

[chemical structure]

wherein each of the alkyl, alkylene, alkenyl, and cycloalkyl is independently substituted or unsubstituted. In some embodiments, R¹ and R² in Formula (I) and Formula (Ia) is independently C₁₀-C₂₀ alkyl, C₁₀-C₂₀ alkenyl. —C₈-C₇ alkylene-L-R⁶, or

[chemical structure]

wherein each of the alkyl, alkylene, alkenyl, and cycloalkyl is independently substituted or unsubstituted. In some embodiments, R¹ in Formula (I) and Formula (Ia) is

[chemical structure]

[0572] In some embodiments, each of L in Formula (I) and Formula (Ia) is independently O, S, —C₁-C₁₀ alkylene-O—, —C₁-C₁₀ alkylene-C(═O)O—, —C₁-C₁₀ alkylene-OC(═O)—, or a bond, wherein the alkylene is substituted or unsubstituted. In some embodiments, each of L in Formula (I) and Formula (Ia) is independently O, S, —C₁-C₃ alkylene-O—, —C₁-C₃ alkylene-C(═O)O—, —C₁-C₃ alkylene-OC(═O)—, or a bond, wherein the alkylene is substituted or unsubstituted. In some embodiments, each of L in Formula (I) and Formula (Ia) is independently O, S, —C₁-C₃ alkylene-O—, —C₁-C₃ alkylene-C(═O)O—, —C₁-C₃ alkylene-OC(═O)—, or a bond, wherein the alkylene is linear or branched unsubstituted alkylene.

[0573] In some embodiments, each of R⁶ in Formula (I) and Formula (Ia) is independently substituted or unsubstituted linear C₃-C₂₂ alkyl or substituted or unsubstituted linear C₃-C₂₂ alkenyl. In some embodiments, each of R⁶ in Formula (I) and Formula (Ia) is independently substituted or unsubstituted C₃-C₂₀ alkyl or substituted or unsubstituted C₃-C₂₀ alkenyl. In some embodiments, each of R⁶ in Formula (I) and Formula (Ia) is independently substituted or unsubstituted C₃-C₁₀ alkyl or substituted or unsubstituted C₃-C₁₀ alkenyl. In some embodiments, each of R⁶ in Formula (I) and Formula (Ia) is independently substituted or unsubstituted C₃-C₁₀ alkyl. In some embodiments, each of R⁶ in Formula (I) and Formula (Ia) is independently substituted or unsubstituted linear C₃-C₁₀ alkyl. In some embodiments, each of R⁶ in Formula (I) and Formula (Ia) is independently substituted or unsubstituted n-pentyl, n-hexyl, n-heptyl, n-octyl, n-nonyl, n-decyl, n-undecyl, or n-dodecyl. In some embodiments, each of R⁶ in Formula (I) and Formula (Ia) is independently substituted or unsubstituted n-octyl. In some embodiments, each of R⁶ in Formula (I) and Formula (Ia) is n-octyl.

[0574] In some embodiments, each of L in Formula (I) and Formula (Ia) is independently-C(═O)O—, —OC(═O)—, —C₁-C₁₀ alkylene-O—, or O. In some embodiments, each of. L in Formula (I) and Formula (Ia) is O. In some embodiments, each of L in Formula (I) and Formula (Ia) is —C₁-C₃ alkylene-O—. In some embodiments, p in Formula (I) and Formula (Ia) is 1, 2, 3, 4, or 5. In some embodiments, p in Formula (I) and Formula (Ia) is 2.

[0575] In some embodiments, R¹ in Formula (I) and Formula (Ia) is

[chemical structure]

[0576] In some embodiments R¹ in Formula (I) and Formula (Ia) is R².

[0577] In some embodiments, each of R⁴ in Formula (I) and Formula (Ia) is independently H or substituted or unsubstituted C₁-C₄ alkyl. In some embodiments, each of. R⁴ in Formula (I) and Formula (Ia) is independently substituted or unsubstituted linear C₁-C₄ alkyl. In some embodiments, each of R⁴ in Formula (1) and Formula (Ia) is H. In some embodiments, each of R⁴ in Formula (I) and Formula (Ia) is independently H, —CH₃, —CH₂CH₃, —CH₂CH₂CH₃, or —CH(CH₃)₂. In some embodiments, each of R⁴ in Formula (I) and Formula (Ia) is independently H or —CH₃. In some embodiments, each of R⁴ in Formula (I) and Formula (Ia) is —CH₃.

[0578] In some embodiments, X in Formula (I) and Formula (Ia) is —C(═O)O— or —OC(═O))—. In some embodiments, X in Formula (I) and Formula (Ia) is —C(═O)NR⁴— or —NR⁴C(═O)—. In some embodiments, X in Formula (I) and Formula (Ia) is —C(═O)N(CH₃)—, —N(CH₃)C(═O)—, —C(═O) NH—, or —NHC(═O)—. In some embodiments, X in Formula (I) and Formula (Ia) is —C(═O)) NH—, —C(═O)N(CH₃)—, —OC(═O))—, —NHC(═O)—, —N(CH₃)C(═O))—, —C(═O)O—, —OC(═O)O—, —NHC(═O)O—, —N(CH₃)C(═O)O—, —OC(═O)) NH—, —OC(═O)N(CH₃)—, —NHC(═O) NH—, —N(CH₃)C(═O)) NH—, —NHC(═O)N(CH₃)—, —N(CH₃)C(═O)N(CH₃)—, NHC(═NH) NH—, —N(CH₃)C(═NH) NH—, —NHC(═NH)N(CH₃)—, —N(CH₃)C(═NH)N(CH₃)—, NHC(═NMe) NH—, —N(CH₃)C(═NMe) NH—, —NHC(═NMe)N(CH₃)—, or —N(CH₃)C(═NMe)N(CH₃)—.

[0579] In some embodiments. R² in Formula (I) and Formula (Ia) is C₃-C₂₂ alkyl, C₃-C₂₂ alkenyl, —C₂-C₁₀ alkylene-L-R⁶, or

[chemical structure]

wherein each of the alkyl, alkylene, alkenyl, and cycloalkyl is independently substituted or unsubstituted. In some embodiments, R² in Formula (I) and Formula (Ia) is substituted or unsubstituted C₇-C₂₂ alkyl or substituted or unsubstituted C₃-C₂₂ alkenyl. In some embodiments, R² in Formula (I) and Formula (Ia) is substituted or unsubstituted linear C₇-C₂₂ alkyl or substituted or unsubstituted linear C₃-C₂₂ alkenyl. In some embodiments, R² in Formula (I) and Formula (Ia) is substituted or unsubstituted C₁₀-C₂₀ alkyl or substituted or unsubstituted C₁₀-C₂₀ alkenyl. In some embodiments, R² in Formula (I) and Formula (Ia) is unsubstituted C₁₀-C₂₀ alkyl. In some embodiments, R² in Formula (I) and Formula (Ia) is unsubstituted C₁₀-C₂₀ alkenyl. In some embodiments, R² in Formula (I) and Formula (Ia) is —C₂-C₁₀ alkylene-L—R⁶. In some embodiments, R² in Formula (I) and Formula (Ia) is —C₂-C₁₀ alkylene-C(═O)O—R⁶ or —C₂-C₁₀ alkylene-OC(═O)—R⁶.

[0580] In some embodiments, R² in Formula (I) and Formula (Ia) is

[chemical structure]

[0581] In some embodiments R¹ in Formula (I) and Formula (Ia) is R¹.

[0582] In some embodiments, Y in Formula (I) and Formula (Ia) is —C(═O)O— or —OC(═O)—. In some embodiments, Y in Formula (I) and Formula (Ia) is —C(═O)NR⁴— or —NR⁴C(═O)—. In some embodiments, Y in Formula (I) and Formula (Ia) is —C(═O)N(CH₃)—, —N(CH₃)C(═O)—, —C(═O)NH—, or —NHC(═O)—. In some embodiments, Y in Formula (I) and Formula (Ia) is —OC(═O)O—, —NR⁴C(═O)O—, —OC(═O)NR⁴—, or —NR⁴C(═O)NR⁴—. In some embodiments, Y in Formula (I) and Formula (Ia) is —OC(═O)O—, —NHC(═O)O—, —OC(═O) NH—, —NHC(═O) NH—, —N(CH₃)C(═O)O—, —OC(═O)N(CH₃)—, —N(CH₃)C(═O)N(CH₃)— or —N(CH₃)C(═O) NH—. In some embodiments, Y in Formula (I) and Formula (Ia) is —OC(═O)O—, —NHC(═O)₀—, —OC(═O) NH—, or —NHC(═O) NH—.

[0583] In some embodiments, R³ in Formula (I) and Formula (Ia) is —C₀-C₁₀ alkylene-NR⁷R⁸ or —C₀-C₁₀ alkylene-heterocycloalkyl, wherein the alkylene and heterocycloalkyl is independently substituted or unsubstituted. In some embodiments, R³ in Formula (I) and Formula (Ia) is —C₀-C₁₀ alkylene-NR⁷R⁸. In some embodiments, R³ in Formula (I) and Formula (Ia) is —C₁-C₆ alkylene-NR⁷R⁸. In some embodiments, R³ in Formula (I) and Formula (Ia) is —C₁-C₄ alkylene-NR⁷R⁸. In some embodiments, R³ in Formula (I) and Formula (Ia) is —C₁-alkylene-NR⁷R⁸. In some embodiments, R³ in Formula (I) and Formula (Ia) is —C₂—-alkylene-NR⁷R⁸. In some embodiments, R³ in Formula (I) and Formula (Ia) is —C₃-alkylene-NR⁷R⁸ In some embodiments, R³ in Formula (I) and Formula (Ia) is —C₄-alkylene-NR⁷R⁸. In some embodiments, R³ in Formula (I) and Formula (Ia) is —C₅-alkylene-NR⁷R⁸. In some embodiments, R³ in Formula (I) and Formula (Ia) is —C₀-C₁₀ alkylene-heterocycloalkyl. In some embodiments, R³ in Formula (I) and Formula (Ia) is —C₁-C₆ alkylene-heterocycloalkyl, wherein the heterocycloalkyl comprises 1 to 3 nitrogen and 0-2 oxygen. In some embodiments, R³ in Formula (I) and Formula (Ia) is —C₁-C₆ alkylene-heterocycloaryl.

[0584] In some embodiments, each of R⁷ and R⁸ in Formula (I) and Formula (Ia) is independently hydrogen or substituted or unsubstituted C₁-C₆ alkyl. In some embodiments, each of R⁷ and R⁸ is independently hydrogen or substituted or unsubstituted C₁-C₃ alkyl. In some embodiments, each of R⁷ and R⁸ is independently substituted or unsubstituted C₁-C₃ alkyl. In some embodiments, each of R⁷ and R⁸ is independently-CH₃, —CH₂CH₃, —CH₂CH₂CH₃, or —CH(CH₃)₂. In some embodiments, each of R and R⁸ is CH₃. In some embodiments, each of R⁷ and R⁸ is —CH₂CH₃.

[0585] In some embodiments, R⁷ and R⁸ in Formula (I) and Formula (Ia) taken together with the nitrogen to which they are attached form a substituted or unsubstituted C₂-C₆ heterocyclyl. In some embodiments, R⁷ and R⁸ taken together with the nitrogen to which they are attached form a substituted or unsubstituted C₂-C₆ heterocycloalkyl. In some embodiments, R⁷ and R⁸ taken together with the nitrogen to which they are attached form a substituted or unsubstituted 3-7 membered heterocycloalkyl.

[0586] In some embodiments, R³ in Formula (I) and Formula (Ia) is

[chemical structure]

[0587] In some embodiments. R³ in Formula (I) and Formula (Ia) is

[chemical structure]

[0588] In some embodiments. R³ in Formula (1) and Formula (Ia) is

[chemical structure]

[0589] In some embodiments, Z in Formula (I) and Formula (Ia) is —C(═O)O— or —OC(═O)—.

[0590] In some embodiments, Z in Formula (I) and Formula (Ia) is —C(═O)NR⁴— or —NR⁴C(═O)—.

[0591] In some embodiments, Z in Formula (I) and Formula (Ia) is —C(═O)N(CH₃)—, —N(CH₃)C(═O)—, —C(═O) NH—, or —NHC(═O)—.

[0592] In some embodiments, Z in Formula (I) and Formula (Ia) is —OC(═O)O—, —NR⁴C(═O)O—, —OC(O)NR⁴—, or —NR⁴C(═O)NR⁴—.

[0593] In some embodiments, Z in Formula (I) and Formula (Ia) is —OC(═O)O—, —NHC(═O)O—, —OC(═O) NH—, —NHC(═O) NH—, —N(CH₃)C(═O)O—, —OC(═O)N(CH₃)—, —N(CH₃)C(═O)N(CH₃)—, —NHC(═O)N(CH₃)— or —N(CH₃)C(═O) NH—.

[0594] In some embodiments, Y in Formula (I) and Formula (Ia) is —OC(═O)O—, —NHC(═O)O—, —OC(═O) NH—, or —NHC(═O)NH—.

[0595] In some embodiments, R⁵ in Formula (I) and Formula (Ia) is hydrogen or substituted or unsubstituted C₁-C₃ alkyl.

[0596] In some embodiments, R⁵ in Formula (I) and Formula (Ia) is H, —CH₃, —CH—)CH₃, —CH₂CH₂CH₃, or —CH(CH₃)₂.

[0597] In some embodiments, R⁵ in Formula (I) and Formula (Ia) is H.

### Exemplary Lipids of WO2022140252

[0598] In another aspect, an amino lipid is according to any formula or structure, or a pharmaceutically acceptable salt or solvate thereof, as described in International Publication No. WO2022140252, which is hereby incorporated by reference in its entirety. In some embodiments, an amino lipid has a structure according to any of Formulae A′, A, I″, I′, I, II″, II′, II, III′, III, I″-a, I′-a, I-a, I″-a-i, I″-a-ii, I″-a-iii, I″-b, I′-b, I-b, I″-b-i, I″-b-ii, I″-b-iii, I″-c, I′-c, I-c, I″-c-i, I″-c-ii, I″-c-iii, I′-d, I-d, I′-d-i, II-a, II-a-i, III-a, and III-a-i of WO2022140252, or a pharmaceutically acceptable salt or solvate thereof. Exemplary amino lipids also include any of the lipids of Table 1 of WO2022140252, including any of the lipids represented by Examples 7-1 to 7-253 and Examples 8-1 to 8-106, or a pharmaceutically acceptable salt or solvate thereof.

[0599] In some embodiments, an amino lipid is according to Formula A′ of WO2022140252:

[chemical structure]

[0600] or its N-oxide, or a pharmaceutically acceptable salt thereof, wherein
[0601] L¹ is absent, C₁-6 alkylenyl, or C₂-6 heteroalkylenyl;
[0602] each L² is independently optionally substituted C₂₋₁₅ alkylenyl, or optionally substituted C₃₋₁₅ heteroalkylenyl;
[0603] L is C₁-10 alkylenyl, or C₂-10 heteroalkylenyl;
[0604] X² is —OC(O)—, —C(O)O—, or —OC(O)O—;
[0605] X is absent, —OC(O)—, —C(O)O—, or —OC(O)O—;
[0606] R″ is hydrogen,

[chemical structure]

or an optionally substituted group selected from C₆-20 aliphatic, 3- to 12-membered cycloaliphatic, 7- to 12-membered bridged bicyclic comprising 0-4 heteroatoms independently selected from nitrogen, oxygen, or sulfur, 1-adamantyl, 2-adamantyl, sterolyl, and phenyl;
[0607] each of R and R^{a} is independently hydrogen, or an optionally substituted group selected from C₆-20 aliphatic, 3- to 12-membered cycloaliphatic, 7- to 12-membered bridged bicyclic comprising 0-4 heteroatoms independently selected from nitrogen, oxygen, or sulfur, 1-adamantyl, 2-adamantyl, sterolyl, and phenyl
[0608] each of L³ and L^{3a} is independently absent, optionally substituted C₁₋₁₀ alkylenyl, or optionally substituted C₂₋₁₀ heteroalkylenyl;
[0609] R¹ is hydrogen, optionally substituted phenyl, optionally substituted 3- to 7-membered cycloaliphatic, optionally substituted 3- to 7-membered heterocyclyl comprising 1-3 heteroatoms independently selected from nitrogen, oxygen, and sulfur, optionally substituted 5- to 6-membered monocyclic heteroaryl comprising 1-4 heteroatoms independently selected from nitrogen, oxygen, and sulfur, optionally substituted 8- to 10-membered bicyclic heteroaryl comprising 1-4 heteroatoms independently selected from nitrogen, oxygen, and sulfur, —OR², —C(O)OR², —C(O)SR², —OC(O)R², —OC(O)OR², —CN, —N(R²)₂, —C(O)N(R²)₂, —S(O)₂N(R²)₂, —NR²C(O)R², —OC(O)N(R²)₂, —N(R²)C(O)OR², —NR²S(O)₂R², —NR²C(O)N(R²)₂, —NR²C(S)N(R²)₂, —NR²C(NR²)N(R²)₂, —NR²C(CHR²)N(R²)₂, —N(OR²)C(O)R², —N(OR²) S(O)₂R², —N(OR²)C(O)OR², —N(OR²)C(O)N(R²)₂, —N(OR²)C(S)N(R²)₂, —N(OR²)C(NR²)N(R²)₂, —N(OR²)C(CHR²)N(R²)₂, —C(NR²)N(R²)₂, —C(NR²)R², —C(O)N(R²)OR², —C(R²)N(R²)₂C(O)OR², —CR² (R³)₂, —OP(O)(OR²)₂, or —P(O)(OR²)₂; or
[0610] R¹ is

[chemical structure]

or a ring selected from 3- to 7-membered cycloaliphatic and 3- to 7-membered heterocyclyl comprising 1-3 heteroatoms independently selected from nitrogen, oxygen, and sulfur, wherein the cycloaliphatic or heterocyclyl ring is optionally substituted with 1-4 R² or R³ groups;
[0611] each R² is independently hydrogen, oxo, —CN, —NO₂, —OR⁴, —S(O)₂R⁴, —S(O)₂N(R⁴)₂, —(CH₂)ₙ—R⁴, or an optionally substituted group selected from C₁-6 aliphatic, phenyl, 3- to 7-membered cycloaliphatic, 5- to 6-membered monocyclic heteroaryl comprising 1-4 heteroatoms independently selected from nitrogen, oxygen, and sulfur, and 3- to 7-membered heterocyclyl comprising 1-3 heteroatoms independently selected from nitrogen, oxygen, and sulfur; or
   [0612] two occurrences of R², taken together with the atom(s) to which they are attached, form optionally substituted 4- to 7-membered heterocyclyl comprising 0-1 additional heteroatom selected from nitrogen, oxygen, and sulfur;
[0613] each R³ is independently —(CH₂)ₙ—R⁴; or two occurrences of R³, taken together with the atom(s) to which they are attached, form optionally substituted 5- to 6-membered heterocyclyl comprising 0-1 additional heteroatom selected from nitrogen, oxygen, and sulfur;
[0614] each R⁴ is independently hydrogen, —OR⁵, —N(R⁵)₂, —OC(O)R⁵, —OC(O)OR⁵, —CN, —C(O)N(R⁵)₂,
   [0615] —NR⁵C(O)R⁵, —OC(O)N(R⁵)₂, —N(R⁵)C(O)OR⁵, —NR⁵S(O)₂R⁵, —NR⁵C(O)N(R⁵)₂,
   [0616] —NR⁵C(S)N(R⁵)₂, —NR⁵C(NR⁵)N(R⁵)₂, or

[chemical structure]

[0617] each R⁵ is independently hydrogen, or optionally substituted C₁₋₆ aliphatic; or two occurrences of R⁵, taken together with the atom(s) to which they are attached, form optionally substituted 4- to 7-membered heterocyclyl comprising 0-1 additional heteroatom selected from nitrogen, oxygen, and sulfur;
[0618] each R⁶ is independently C₄-12 aliphatic; and each n is independently 0 to 4.

[0619] In some embodiments, an amino lipid is according to Formula III-a of WO2022140252:

[chemical structure]

[0620] or its N-oxide, or a pharmaceutically acceptable salt thereof, wherein each of R, R¹, L, L¹, L², L³ is as defined therein for any of Formulae A′, A, III′, and III, and described in classes and subclasses above and herein, both singly and in combination. In embodiments of Formula III-a, each of R, R¹, L, L¹, L², L³ is as defined herein for Formula A′ above.

[0621] In some embodiments, an amino lipid is according to Formula III-a-i of WO2022140252:

[chemical structure]

[0622] or its N-oxide, or a pharmaceutically acceptable salt thereof, wherein each of R, R¹, L, L¹, and L² is as defined therein for any of Formulae A′, A, III′, and III, and described in classes and subclasses above and herein, both singly and in combination. In embodiments of Formula III-a-i, each of R, R¹, L, L¹, and L² is as defined herein for Formula A′ above.

[0623] In some embodiments, an amino lipid is selected from any of the lipids described in

TABLE 1
of WO2022140252, or its N-oxide, or a pharmaceutically acceptable salt thereof. In
embodiments, an amino lipid is selected from the group consisting of:

| | |
|---|---|
| [chemical structure] | 7-1 |
| [chemical structure] | 7-2 |
| [chemical structure] | 7-19 |
| [chemical structure] | 7-20 |
| [chemical structure] | 7-22 |
| [chemical structure] | 7-24 |
| [chemical structure] | 7-25 |
| [chemical structure] | 8-1 |
| [chemical structure] | 8-2 |
| [chemical structure] | 8-3 |
| [chemical structure] | 8-4 |
| [chemical structure] | 8-5 |
| [chemical structure] | 8-6 |
| [chemical structure] | 8-7 |
| [chemical structure] | 8-13 |
| [chemical structure] | 8-14 |
| [chemical structure] | 8-17 |
| [chemical structure] | 8-18 |
| [chemical structure] | 8-19 |
| [chemical structure] | 8-20 |
| [chemical structure] | 8-55 |
| [chemical structure] | 8-57 |
| [chemical structure] | 8-58 |
| [chemical structure] | 8-59 |
| [chemical structure] | 8-60 |
| [chemical structure] | 8-61 |
| [chemical structure] | 8-62 |
| [chemical structure] | 8-63 |
| [chemical structure] | 7-232 |
| [chemical structure] | 7-233 |
| [chemical structure] | 7-234 |
| [chemical structure] | 7-235 |
| [chemical structure] | 7-236 |
| [chemical structure] | 7-237 |
| [chemical structure] | 7-238 |
| [chemical structure] | 7-239 |
| [chemical structure] | 8-67 |
| [chemical structure] | 8-68 |
| [chemical structure] | 8-69 |
| [chemical structure] | 8-70 |
| [chemical structure] | 8-71 |
| [chemical structure] | 8-72 |
| [chemical structure] | 7-243 |
| [chemical structure] | 7-244 |
| [chemical structure] | 7-245 |
| [chemical structure] | 7-246 |

[0624] In some embodiments, an amino lipid is Example 7-1, or a pharmaceutically acceptable salt thereof. In some embodiments, an amino lipid is Example 7-2, or a pharmaceutically acceptable salt thereof. In some embodiments, an amino lipid is Example 7-19, or a pharmaceutically acceptable salt thereof. In some embodiments, an amino lipid is Example 7-20, or a pharmaceutically acceptable salt thereof. In some embodiments, an amino lipid is Example 7-22, or a pharmaceutically acceptable salt thereof. In some embodiments, an amino lipid is Example 7-24, or a pharmaceutically acceptable salt thereof. In some embodiments, an amino lipid is Example 7-25, or a pharmaceutically acceptable salt thereof. In some embodiments, an amino lipid is Example 8-1, or a pharmaceutically acceptable salt thereof. In some embodiments, an amino lipid is Example 8-2, or a pharmaceutically acceptable salt thereof. In some embodiments, an amino lipid is Example 8-3, or a pharmaceutically acceptable salt thereof. In some embodiments, an amino lipid is Example 8-4, or a pharmaceutically acceptable salt thereof. In some embodiments, an amino lipid is Example 8-5, or a pharmaceutically acceptable salt thereof. In some embodiments, an amino lipid is Example 8-13, or a pharmaceutically acceptable salt thereof. In some embodiments, an amino lipid is Example 8-14, or a pharmaceutically acceptable salt thereof. In some embodiments, an amino lipid is Example 8-17, or a pharmaceutically acceptable salt thereof. In some embodiments, an amino lipid is Example 8-18, or a pharmaceutically acceptable salt thereof. In some embodiments, an amino lipid is Example 8-19, or a pharmaceutically acceptable salt thereof. In some embodiments, an amino lipid is Example 8-20, or a pharmaceutically acceptable salt thereof. In some embodiments, an amino lipid is Example 8-55, or a pharmaceutically acceptable salt thereof. In some embodiments, an amino lipid is Example 8-57, or a pharmaceutically acceptable salt thereof. In some embodiments, an amino lipid is Example 8-58, or a pharmaceutically acceptable salt thereof. In some embodiments, an amino lipid is Example 8-59, or a pharmaceutically acceptable salt thereof. In some embodiments, an amino lipid is Example 8-60, or a pharmaceutically acceptable salt thereof. In some embodiments, an amino lipid is Example 8-61, or a pharmaceutically acceptable salt thereof. In some embodiments, an amino lipid is Example 8-62, or a pharmaceutically acceptable salt thereof. In some embodiments, an amino lipid is Example 8-63, or a pharmaceutically acceptable salt thereof. In some embodiments, an amino lipid is Example 7-232, or a pharmaceutically acceptable salt thereof. In some embodiments, an amino lipid is Example 7-233, or a pharmaceutically acceptable salt thereof. In some embodiments, an amino lipid is Example 7-234, or a pharmaceutically acceptable salt thereof. In some embodiments, an amino lipid is Example 7-235, or a pharmaceutically acceptable salt thereof. In some embodiments, an amino lipid is Example 7-236, or a pharmaceutically acceptable salt thereof. In some embodiments, an amino lipid is Example 7-237, or a pharmaceutically acceptable salt thereof. In some embodiments, an amino lipid is Example 7-238, or a pharmaceutically acceptable salt thereof. In some embodiments, an amino lipid is Example 7-239, or a pharmaceutically acceptable salt thereof. In some embodiments, an amino lipid is Example 8-67, or a pharmaceutically acceptable salt thereof. In some embodiments, an amino lipid is Example 8-68, or a pharmaceutically acceptable salt thereof. In some embodiments, an amino lipid is Example 8-69, or a pharmaceutically acceptable salt thereof. In some embodiments, an amino lipid is Example 8-70, or a pharmaceutically acceptable salt thereof. In some embodiments, an amino lipid is Example 8-71, or a pharmaceutically acceptable salt thereof. In some embodiments, an amino lipid is Example 8-72, or a pharmaceutically acceptable salt thereof. In some embodiments, an amino lipid is Example 7-243, or a pharmaceutically acceptable salt thereof. In some embodiments, an amino lipid is Example 7-244, or a pharmaceutically acceptable salt thereof. In some embodiments, an amino lipid is Example 7-245, or a pharmaceutically acceptable salt thereof. In some embodiments, an amino lipid is Example 7-246, or a pharmaceutically acceptable salt thereof.

### Exemplary Lipids of WO2022159472

[0625] In another aspect, an amino lipid is according to any formula or structure, or a pharmaceutically acceptable salt or solvate thereof, as described in International Publication No. WO2022159472, which is hereby incorporated by reference in its entirety. In some embodiments, an amino lipid has a structure according to any of Formulae I, II, III, IIIA, IIIB, IIIC, IV, V, VA, VI, VIA, VII, and VIIA of WO2022159472, or a pharmaceutically acceptable salt or solvate thereof. Exemplary amino lipids also include any of the lipids of Table 1 of WO2022159472, including any of the lipids represented by Examples 4-1 to 4-86, or a pharmaceutically acceptable salt or solvate thereof.

[0626] In some embodiments, an amino lipid is according to Formula I of WO2022159472:

[chemical structure]

[0627] or a pharmaceutically acceptable salt thereof, wherein:
[0628] L¹ is a covalent bond, —C(O)—, or —OC(O)—;
[0629] L² is a covalent bond, an optionally substituted bivalent saturated or unsaturated, straight or branched C₁-C₁₂ hydrocarbon chain, or

[chemical structure]

[0630] Cy^{A} is an optionally substituted ring selected from phenylene and 3- to 7-membered saturated or partially unsaturated carbocyclene;
[0631] each m is independently 0, 1, or 2;
[0632] L³ is a covalent bond, —C(O)—, —C(O)O—, —OC(O)—, —O—, or —OC(O)O—;
[0633] R¹ is

[chemical structure]

an optionally substituted saturated or unsaturated, straight or branched C₁-C₂₀ hydrocarbon chain wherein 1-3 methylene units are optionally and independently replaced with —O— or —NR—, or

[chemical structure]

[0634] Cy^{B} is an optionally substituted ring selected from 3- to 12-membered saturated or partially unsaturated carbocyclyl, 1-adamantyl, 2-adamantyl,

[chemical structure]

sterolyl, and phenyl;
[0635] p is 0, 1, 2, or 3;
[0636] each L⁴ is independently a bivalent saturated or unsaturated, straight or branched C₁-C₆ hydrocarbon chain;
[0637] each A¹ and A² is independently an optionally substituted C₁-C₂₀ aliphatic or —L⁵-R⁵;
   [0638] or A¹ and A², together with their intervening atoms, may form an optionally substituted ring:

[chemical structure]

[0639] where
   [0640] x is selected from 1 or 2; and
   [0641] #represents the point of attachment to L⁴;
[0642] each L⁵ is independently a bivalent saturated or unsaturated, straight or branched C₁-C₂₀ hydrocarbon chain, wherein 1-3 methylene units are optionally and independently replaced with —O— or —NR—;
[0643] each R⁵ is independently an optionally substituted group selected from a 5- to 10-membered aryl ring or a 3- to 8-membered carbocyclic ring;
[0644] X¹ is a covalent bond, —O—, or —NR—;
[0645] X² is a covalent bond or an optionally substituted, bivalent saturated or unsaturated, straight or branched, C₁-C₁₂ hydrocarbon chain, wherein 1-3 methylene units are optionally and independently replaced with —O—, —NR—, or —Cy^{C}—;
[0646] Cy^{C} is an optionally substituted ring selected from 3- to 7-membered saturated or partially unsaturated carbocyclene, phenylene, 3- to 7-membered saturated or partially unsaturated heterocyclene having 1-3 heteroatoms independently selected from nitrogen, oxygen, and sulfur, and 5- to 6-membered heteroarylene having 1-3 heteroatoms independently selected from nitrogen, oxygen, and sulfur;
[0647] X³ is hydrogen or an optionally substituted ring selected from 3- to 7-membered saturated or partially unsaturated carbocyclyl, phenyl, 3- to 7-membered saturated or partially unsaturated heterocyclyl having 1-3 heteroatoms independently selected from nitrogen, oxygen, and sulfur, or 5- to 6-membered heteroaryl having 1-3 heteroatoms independently selected from nitrogen, oxygen, and sulfur; and
[0648] each R is independently hydrogen or an optionally substituted C₁-C₆ aliphatic group; provided that when L³ is a covalent bond, then R¹ must be

[chemical structure]

[0649] In some embodiments, an amino lipid is according to Formula VI of WO2022159472:

[chemical structure]

or a pharmaceutically acceptable salt thereof, wherein n is 1, 2, 3 or 4, and L², R¹, A¹, A², X¹,

[0650] X², and X³ are as defined therein for Formula I and also described in classes and subclasses therein, both singly and in combination. In embodiments, L², R¹, A¹, A², X¹, X², and X³ are as defined herein for Formula I above.

[0651] In some embodiments, an amino lipid is according to Formula VIA of WO2022159472:

[chemical structure]

or a pharmaceutically acceptable salt thereof, wherein n is 1, 2, 3 or 4, and L², R¹, A¹, A², X², and X³ are as defined therein for Formula I and also described in classes and subclasses therein, both singly and in combination. In embodiments, L², R¹, A¹, A², X², and X³ are as defined herein for Formula I above.

[0652] In some embodiments, an amino lipid is selected from any of the lipids described in Table 1 of WO2022159472, or a pharmaceutically acceptable salt thereof. In embodiments, an amino lipid is selected from the group consisting of:

[chemical structure]

[chemical structure]

[chemical structure]

[chemical structure]

[chemical structure]

[0653] In some embodiments, an amino lipid is Example 4-62, or a pharmaceutically acceptable salt thereof. In some embodiments, an amino lipid is Example 4-63, or a pharmaceutically acceptable salt thereof. In some embodiments, an amino lipid is Example 4-64, or a pharmaceutically acceptable salt thereof. In some embodiments, an amino lipid is Example 4-65, or a pharmaceutically acceptable salt thereof. In some embodiments, an amino lipid is Example 4-66, or a pharmaceutically acceptable salt thereof. In some embodiments, an amino lipid is Example 4-67, or a pharmaceutically acceptable salt thereof. In some embodiments, an amino lipid is Example 4-68, or a pharmaceutically acceptable salt thereof. In some embodiments, an amino lipid is Example 4-69, or a pharmaceutically acceptable salt thereof. In some embodiments, an amino lipid is Example 4-70, or a pharmaceutically acceptable salt thereof. In some embodiments, an amino lipid is Example 4-71, or a pharmaceutically acceptable salt thereof. In some embodiments, an amino lipid is Example 4-72, or a pharmaceutically acceptable salt thereof. In some embodiments, an amino lipid is Example 4-73, or a pharmaceutically acceptable salt thereof. In some embodiments, an amino lipid is Example 4-74, or a pharmaceutically acceptable salt thereof. In some embodiments, an amino lipid is Example 4-75, or a pharmaceutically acceptable salt thereof. In some embodiments, an amino lipid is Example 4-76, or a pharmaceutically acceptable salt thereof. In some embodiments, an amino lipid is Example 4-77, or a pharmaceutically acceptable salt thereof. In some embodiments, an amino lipid is Example 4-78, or a pharmaceutically acceptable salt thereof. In some embodiments, an amino lipid is Example 4-79, or a pharmaceutically acceptable salt thereof. In some embodiments, an amino lipid is Example 4-80, or a pharmaceutically acceptable salt thereof. In some embodiments, an amino lipid is Example 4-81, or a pharmaceutically acceptable salt thereof. In some embodiments, an amino lipid is Example 4-82, or a pharmaceutically acceptable salt thereof. In some embodiments, an amino lipid is Example 4-83, or a pharmaceutically acceptable salt thereof. In some embodiments, an amino lipid is Example 4-84, or a pharmaceutically acceptable salt thereof. In some embodiments, an amino lipid is Example 4-85, or a pharmaceutically acceptable salt thereof. In some embodiments, an amino lipid is Example 4-86, or a pharmaceutically acceptable salt thereof.

### Exemplary Lipids of WO 2021141969

[0654] In another aspect, an amino lipid is according to any formula or structure, or a pharmaceutically acceptable salt or solvate thereof, as described in International Publication No. WO2021141969, which is hereby incorporated by reference in its entirety. In some embodiments, an amino lipid has a structure according to any of Formulae I of WO2021141969, or a pharmaceutically acceptable salt or solvate thereof. Exemplary amino lipids also include any of the lipids represented by the Examples of WO2021141969.

[0655] In some embodiments, an amino lipid is according to a compound of Formula I of WO2021141969:

[chemical structure]

[0656] In various embodiments, the compound of Formula (I) is an ionizable lipid as described elsewhere herein. In various embodiments, R¹ in Formula (I) is C₉-C₂₀ alkyl or C₉-C₂₀ alkenyl with 1-3 units of unsaturation. For example, in some embodiments R¹ in Formula (I) is C₉-C₂₀ alkenyl with 2 units of unsaturation, such as a C₁₇ alkenyl group of the formula

[chemical structure]

[0657] In various embodiments, X¹ and X² in Formula (I) are each independently absent or selected from —O—, —NR²—, and

[chemical structure]

wherein R² is hydrogen or C₁-C₆ alkyl, a is an integer between 1 and 6, X⁷ is independently hydrogen, hydroxyl or —NR⁶R⁷, and R⁶ and R⁷ are each independently hydrogen or C₁-C₆ alkyl; or alternatively R⁶ and R⁷ join together with the nitrogen to which they are bound to form a 4- to 7-membered heterocyclyl optionally substituted with 1 or 2 C₁-C₆ alkyl groups, wherein the heterocyclyl optionally includes an additional heteroatom selected from oxygen, sulfur, and nitrogen. In some embodiments, X¹ is absent, X² is absent, or both X¹ and X² are absent. As described elsewhere herein, X¹-X²-X³-X⁴ does not contain any oxygen-oxygen, oxygen-nitrogen or nitrogen-nitrogen bonds to one another. Accordingly, X¹ and X² cannot both be —O— and cannot both be —NR²—. Similarly, X¹ and X² cannot be —O— and —NR²—, respectively, nor —NR²— and —O—, respectively.

[0658] In various embodiments, X¹ is —O—. In various embodiments, X² is —O—. In some embodiments, X¹ is

[chemical structure]

[0659] such as —(CH₂)ₐ—, —CH(OH)— or —(CH₂)ₐ₋₁CH(OH)—. In some embodiments, X² is

[chemical structure]

such as —(CH₂)ₐ—, —CH(OH)— or —(CH₂)ₐ₋₁CH(OH)—. In various embodiments, each a is independently 1, 2, 3, 4, 5 or 6. In various embodiments, X¹ is —NR⁶R⁷. In various embodiments, X² is —NR⁶R⁷. In some embodiments, R⁶ is hydrogen or C₁-C₆ alkyl. In some embodiments, R⁷ is hydrogen or C₁-C₆ alkyl. In other embodiments, R⁶ and R⁷ join together with the nitrogen to which they are bound to form a 4- to 7-membered heterocyclyl optionally substituted with 1 or 2 C₁-C₆ alkyl groups. In some embodiments, the 4- to 7-membered heterocyclyl formed by the joining together of R⁶ and R⁷ optionally includes an additional heteroatom selected from oxygen, sulfur, and nitrogen.

[0660] In various embodiments, X³ and X⁴ in Formula (I) are each independently absent or selected from:
[0661] (1) 4- to 8-membered heterocyclyl optionally substituted with 1 or 2 C₁-C₆ alkyl groups;
[0662] (2) 5- to 6-membered heteroaryl optionally substituted with 1 or 2 C₁-C₆ alkyl groups;
[0663] (3) 5- to 6-membered aryl optionally substituted with 1 or 2 C₁-C₆ alkyl groups;
[0664] (4) 4- to 7-membered cycloalkyl optionally substituted with 1 or 2 C₁-C₆ alkyl groups;
[0665] (5) —O—; or
[0666] (6) —NR³—, wherein each R³ is independently a hydrogen atom or C₁-C₆ alkyl.

[0667] In some embodiments, X³ is absent, X⁴ is absent, or both X³ and X⁴ are absent. As described elsewhere herein, X¹-X²-X³-X⁴ does not contain any oxygen-oxygen, oxygen-nitrogen or nitrogen-nitrogen bonds to one another. Accordingly, X² and X³ cannot both be —O—. When X² is —O— or —NR²— then X³ cannot be —NR³—. Similarly, when X³ is —O— or —NR³— then X² cannot be —NR²—. Likewise, X³ and X⁴ cannot both be —O— and cannot both be —NR³—. Similarly, X³ and X⁴ cannot be —O— and —NR³—, respectively, nor —NR³— and —O—, respectively.

[0668] In various embodiments, X³ and X⁴ in Formula (I) are each independently a 4- to 8-membered heterocyclyl optionally substituted with 1 or 2 C₁-C₆ or C₁-C₃ alkyl groups. For example, in various embodiments X³ and X⁴ are each independently azetidinyl, methylazetidinyl, pyrrolidinyl, methylpyrrolidinyl, piperidinyl, methylpiperidinyl, piperazinyl, methylpiperazinyl, dimethylpiperazinyl, morpholinyl, diazepanyl, methyldiazepanyl, octahydro-2H-quinolizinyl, azabicyclo[3.2.1]octyl, methyl-azabicyclo[3.2.1]octyl, diazaspiro[3.5] nonyl or methyldiazaspiro[3.5] nonyl.

[0669] In various embodiments, X³ and X⁴ in Formula (I) are each independently a 5- to 6-membered heteroaryl optionally substituted with 1 or 2 C₁-C₆ or C₁-C₃ alkyl groups. For example, in various embodiments X³ and X⁴ are each independently pyrrolyl, methylpyrrolyl, imidazolyl, methylimidazolyl, pyridinyl, or methylpyridinyl.

[0670] In various embodiments, X³ and X⁴ in Formula (I) are each independently a 5- to 6-membered aryl optionally substituted with 1 or 2 C₁-C₆ or C₁-C₃ alkyl groups. For example, in various embodiments X³ and X⁴ are each independently phenyl, methylphenyl, naphthyl or methylnaphthyl.

[0671] In various embodiments, X³ and X⁴ in Formula (I) are each independently a 4- to 7-membered cycloalkyl optionally substituted with 1 or 2 C₁-C₆ or C₁-C₃ alkyl groups. For example, in various embodiments X³ and X⁴ are each independently cyclopentyl, methylcyclopentyl, cyclohexyl, or methylcyclohexyl.

[0672] In various embodiments, X³ in Formula (I) is —O—. In other embodiments, X⁴ in Formula (I) is —O—. In various embodiments, X³ is —NR³—, wherein R³ is a hydrogen atom or C₁-C₆ alkyl, such as a C₁-C₃ alkyl. For example, in various embodiments X³ is —N(CH₃)—, —N(CH₂CH₃)—, or N(CH₂CH₂CH₃)—. In other embodiments, X⁴ is —NR³—, wherein R³ is a hydrogen atom or C₁-C₆ alkyl, such as a C₁-C₃ alkyl. For example, in various embodiments X⁴ is —N(CH₃)—, —N(CH₂CH₃)—, or N(CH₂CH₂CH₃)—.

[0673] In various embodiments, X⁵ in Formula (I) is —(CH₂)_{b}—, wherein b is an integer between 0 and 6. In some embodiments, b is 0, in which case X⁵ is absent. In other embodiments, b is 1, 2, 3, 4, 5 or 6.

[0674] In various embodiments, X⁶ in Formula (I) is hydrogen, C₁-C₆ alkyl, 5- to 6-membered heteroaryl optionally substituted with 1 or 2 C₁-C₆ alkyl groups, or —NR⁴R⁵. In some embodiments, R⁴ and R⁵ are each independently hydrogen or C₁-C₆ alkyl. Alternatively, in other embodiments R⁴ and R⁵ join together with the nitrogen to which they are bound to form a 4- to 7-membered heterocyclyl optionally substituted with 1 or 2 C₁-C₆ alkyl groups, wherein the 4- to 7-membered heterocyclyl optionally includes an additional heteroatom selected from oxygen, sulfur, and nitrogen.

[0675] In various embodiments of Formula (I), at least one of X¹, X², X³, X⁴, and X⁵ is present. For example, in various embodiments at least two of X¹, X², X³, X⁴, and X⁵ are present in Formula (I). In other embodiments, at least three of X¹, X², X³, X⁴, and X⁵ are present in Formula (I). For example, in some embodiments, at least four of X¹, X², X³, X⁴, and X⁵ are present in Formula (I). In other embodiments, all of X¹, X², X³, X⁴, and X⁵ are present in Formula (I).

[0676] In some embodiments, X⁶ is hydrogen. In other embodiments, X⁶ is C₁-C₆ alkyl, such as C₁-C₃ alkyl (e.g., methyl, ethyl or propyl). In other embodiments, X⁶ is 5- to 6-membered heteroaryl optionally substituted with 1 or 2 C₁-C₆ alkyl groups. For example, in various embodiments X⁶ is pyrrolyl, methylpyrrolyl, imidazolyl, methylimidazolyl, pyridinyl, or methylpyridinyl. In other embodiments, X⁶ is —NR⁴R⁵. For example, in some embodiments X⁶ is —NH₂, —NHCH₃, —NHCH₂CH₃, —NHCH₂CH₂CH₃, —N(CH₃)₂, —N(CH₂CH₃)₂, or —N(CH₂CH₂CH₃)₂. Alternatively, in other embodiments, R⁴ and R⁵ join together with the nitrogen to which they are bound to form a 4- to 7-membered heterocyclyl. The 4- to 7-membered heterocyclyl can be optionally substituted with 1 or 2 C₁-C₆ alkyl groups, such as C₁-C₃ alkyl, and/or the 4- to 7-membered heterocyclyl can optionally include an additional heteroatom selected from oxygen, sulfur, and nitrogen. For example, in some embodiments X⁶ is azetidinyl, methylazetidinyl, pyrrolidinyl, methylpyrrolidinyl, piperidinyl, methylpiperidinyl, piperazinyl, methylpiperazinyl, dimethylpiperazinyl, morpholinyl, diazepanyl, or methyldiazepanyl.

[0677] In various embodiments, each X⁷ in Formula (I) is hydrogen. In other embodiments, each X⁷ is hydroxyl. In other embodiments, each X⁷ is —NR⁶R⁷. For embodiments in which a is between 2 and 6, each X⁷ can be the same or different. For example, in various embodiments X⁷ is —(CH₂)ₐ₋₁CH(X⁷)—, where a is 2, 3, 4, 5 or 6. In some embodiments for which X⁷ is —NR⁶R⁷, R⁶ and R⁷ are each independently hydrogen or C₁-C₆ alkyl, such as C₁-C₃ alkyl. For example, in some embodiments X⁷ is —NH₂, —NHCH₃, —NHCH₂CH₃, —NHCH₂CH₂CH₃, —N(CH₃)₂, —N(CH₂CH₃)₂, or —N(CH₂CH₂CH₃)₂. Alternatively, in some embodiments for which X⁷ is —NR⁶R⁷, R⁶ and R⁷ join together with the nitrogen to which they are bound to form a 4- to 7-membered heterocyclyl optionally substituted with 1 or 2 C₁-C₆ alkyl groups. Alternatively, in other embodiments for which X⁷ is —NR⁶R⁷, the R⁶ and R⁷ can join together with the nitrogen to which they are bound to form a 4- to 7-membered heterocyclyl. The 4- to 7-membered heterocyclyl can be optionally substituted with 1 or 2 C₁-C₆ alkyl groups, such as C₁-C₃ alkyl, and/or the 4- to 7-membered heterocyclyl can optionally include an additional heteroatom selected from oxygen, sulfur, and nitrogen. For example, in some embodiments X⁶ is azetidinyl, methylazetidinyl, pyrrolidinyl, methylpyrrolidinyl, piperidinyl, methylpiperidinyl, piperazinyl, methylpiperazinyl, dimethylpiperazinyl, morpholinyl, diazepanyl, or methyldiazepanyl.

[0678] In various embodiments, A¹ and A² in Formula (I) are each independently selected from:
[0679] (1) C₅-C₁₂ haloalkyl;
[0680] (2) C₅-C₁₂ alkenyl;
[0681] (3) C₅-C₁₂ alkynyl;
[0682] (4) (C₅-C₁₂ alkoxy)—(CH₂)ₙ₂—;
[0683] (5) (C₅-C₁₀ aryl)—(CH₂)ₙ₃-optionally ring substituted with one or two halo, C₁-C₆ alkyl, C₁-C₆ haloalkyl, or C₁-C₆ alkoxy groups; and
[0684] (6) (C₃-C₈ cycloalkyl)—(CH₂)ₙ₄-optionally ring substituted with 1 or 2 C₁-C₆ alkyl groups;
[0685] or alternatively A¹ and A² join together with the atoms to which they are bound to form a 5- to 6-membered cyclic acetal substituted with 1 or 2 C₄-C₁₀ alkyl groups.

[0686] In various embodiments of Formula (I), n1, n2 and n3 are each individually an integer between 1 and 4 (i.e., 1, 2, 3 or 4), and n4 is an integer between zero and 4 (i.e., 0, 1, 2, 3 or 4). In various embodiments, A¹ and A² have the same chemical structure.

[0687] In various embodiments of Formula (I), A¹ and A² are each independently a C₅-C₁₂ haloalkyl. For example, in various embodiments the C₅-C₁₂ haloalkyl is a C₅-C₁₂ fluoroalkyl such as a C₆ fluoroalkyl, a C₇ fluoroalkyl, a C₈ fluoroalkyl, a C₉ fluoroalkyl, a C₁₀ fluoroalkyl, a C₁₁ fluoroalkyl, or a C₁₂ fluoroalkyl. The number of halogen atoms attached to the C₅-C₁₂ haloalkyl can vary over a broad range, depending on the length of the alkyl chain and the degree of halogenation. For example, in various embodiments the C₅-C₁₂ haloalkyl contains between 1 and 25 halogen atoms, such as 1, 2, 3, 4, 5, 6, 7, 8, 9, 10 or 11 halogen atoms. In various embodiments, the C₅-C₁₂ haloalkyl is a C₅-C₁₂ fluoroalkyl that comprises a fluorinated end group such as CF₃ (CF₂)ₙ₅—, where n5 is an integer in the range of 0 to 5. For example in various embodiments the C₅-C₁₂ fluoroalkyl is CF₃ (CF₂)ₙ₅ (CH₂)ₙ₆—, where n5 is an integer in the range of 0 to 5, n6 is an integer in the range of 0 to 11, and n5+n6+1 is equal to number of carbons in the C₅-C₁₂ fluoroalkyl.

[0688] In various embodiments of Formula (I), A¹ and A² are each independently a C₅-C₁₂ alkenyl. The position of the alkenyl double bond(s) can vary. For example, in various embodiments the C₅-C₁₂ alkenyl is CH₃CH₂CH—CH(CH₂)ₙ₇—, where n7 is an integer in the range of 1 to 8, such as CH₃CH₂CH═CH(CH₂)₄—. In some embodiments, the C₅-C₁₂ alkenyl is branched, such as, for example, (CH₃)₂C═CH(CH₂)ₙ₈—CH(CH₃)—(CH₂)ₙ₉— wherein n8 and n9 are each independently 1, 2 or 3.

[0689] In various embodiments of Formula (I), A¹ and A² are each independently a C₅-C₁₂ alkynyl. The position of the alkynyl triple bond(s) can vary. For example, in various embodiments the C₅-C₁₂ alkynyl is CH₃CH₂C═C(CH₂)ₙ₁₀—, where n10 is an integer in the range of 1 to 8, such as CH₃CH₂C═C(CH₂)₄—. In some embodiments, the C₅-C₁₂ alkynyl is branched, such as, for example, (CH₃)₂CHC═C(CH₂)ₙ₁₁—CH(CH₃)—(CH₂)ₙ₁₂— wherein n11 and n12 are each independently 1, 2 or 3 and n11+n12 is in the range of 2 to 5.

[0690] In various embodiments of Formula (I), A¹ and A² are each independently a (C₅-C₁₂ alkoxy)-(CH₂)ₙ₂—. In various embodiments, each n2 is independently an integer in the range of 1 to 4 (i.e., 1, 2, 3 or 4). The position of the oxygen(s) can vary. For example, in various embodiments the (C₅-C₁₂ alkoxy)-(CH₂)ₙ₂— is CH₃₀ (CH₂)ₙ₁₃—(CH₂)ₙ₂—, where n13 is an integer in the range of 1 to 11, such as CH₃₀ (CH₂)₇—. In other embodiments the (C₅-C₁₂ alkoxy)-(CH₂)ₙ₂— is CH₃(CH₂)ₙ₁₄—O—(CH₂)ₙ₁₅—(CH₂)ₙ₂—, wherein n14 and n15 are each independently integers between 1 and 8, and n14+n15 is an integer in the range of 4 to 11, such as CH₃(CH₂)₇—O—(CH₂)₂—(CH₂)ₙ₂—. In some embodiments, the C₅-C₁₂ alkoxy is branched, such as, for example, CH₃₀ (CH₂)ₙ₁₆—CH(CH₃)—(CH₂)ₙ₁₇—(CH₂)ₙ₂—, wherein n16 and n17 are each independently 1, 2, 3, 4 or 5 and n16+n17 is an integer in the range of 2 to 9.

[0691] In various embodiments of Formula (I), A¹ and A² are each independently a (C₅-C₁₀ aryl)-(CH₂)ₙ₃-optionally ring substituted with one or two halo, C₁-C₆ alkyl, C₁-C₆ haloalkyl, or C₁-C₆ alkoxy groups. In various embodiments, each n3 is independently an integer between 1 and 4 (i.e., 1, 2, 3 or 4). In some embodiments, the C₅-C₁₀ aryl is a phenyl. For example, in various embodiments the (C₅-C₁₀ aryl)-(CH₂)ₙ₃— is C₆H5—(CH₂)ₙ₃— optionally ring substituted with one or two halo, C₁-C₆ alkyl, C₁-C₆ haloalkyl, or C₁-C₆ alkoxy groups. In an embodiment, the optionally ring substituted (C₅-C₁₀ aryl)-(CH₂)ₙ₃— is CF₃-C₆H₄—(CH₂)ₙ₃—, such as CF₃-C₆H4—CH₂— or CF₃—C₆H₄—(CH₂)₂—. In another embodiment, the optionally ring substituted (C₅-C₁₀ aryl)-(CH₂)ₙ₃— is CH₃—(CH₂)ₙ₁₈—C₆H₄—(CH₂)ₙ₂—, wherein n18 is 1, 2 or 3 and n2 is 1, 2, 3 or 4, such as CH₃ (CH₂)₃—C₆H₄—CH₂— or CH₃ (CH₂)₃—C₆H₄—(CH₂)₂—.

[0692] In various embodiments of Formula (I), A¹ and A² are each independently a (C₃-C₈ cycloalkyl)-(CH₂)ₙ₄-optionally ring substituted with 1 or 2 C₁-C₆ alkyl groups. In various embodiments, each n4 is independently an integer between 0 and 4 (i.e., 0, 1, 2, 3 or 4). In some embodiments, the C₃-C₈ cycloalkyl is a cyclohexyl or cyclopentyl. For example, in various embodiments the (C₃-C₈ cycloalkyl)-(CH₂)ₙ₄— is C₆H₁₁—(CH₂)ₙ₄-optionally ring substituted with 1 or 2 C₁-C₆ alkyl groups, such as C₆H₁₁—(CH₂)₂—, C₆H₁₁—(CH₂)₃— or CH₃—C₆H₁₀—(CH₂)₃—.

[0693] Alternatively, in other embodiments of Formula (I), A¹ and A² join together with the atoms to which they are bound to form a 5- to 6-membered cyclic acetal substituted with 1 or 2 C₄-C₁₀ alkyl groups. For example, in an embodiment, A¹ and A² join together with the atoms to which they are bound to form a 6-membered cyclic acetal that is ring substituted with 2 C₈ alkyl groups as follows:

[chemical structure]

In another embodiment,

[0694] A¹ and A² join together with the atoms to which they are bound to form a 5-membered cyclic acetal that is ring substituted with 2 C₈ alkyl groups as follows:

[chemical structure]

### Exemplary Lipids of WO2021113365

[0695] In another aspect, an amino lipid is according to any formula or structure, or a pharmaceutically acceptable salt or solvate thereof, as described in International Publication No. WO2021113365, which is hereby incorporated by reference in its entirety. In some embodiments, an amino lipid has a structure according to any of Formulae I of WO2021113365, or a pharmaceutically acceptable salt or solvate thereof. Exemplary amino lipids also include any of the lipids represented by the Examples of WO2021113365.

[0696] In some embodiments, an amino lipid is according to a compound of Formula I of WO2021113365:

[chemical structure]

[0697] wherein:
[0698] R¹ is C₉-C₂₀ alkyl or C₉-C₂₀ alkenyl with 1-3 units of unsaturation;
[0699] X¹ and X² are each independently absent or selected from —O—, NR², and

[chemical structure]

wherein R² is C₁-C₆ alkyl, and wherein X¹ and X² are not both —O— or NR²;
[0700] a is an integer between 1 and 6;
[0701] X³ and X⁴ are each independently absent or selected from the group consisting of: 4- to 7-membered heterocyclyl optionally substituted with 1 or 2 C₁-C₆ alkyl groups, 5- to 6-membered heteroaryl optionally substituted with 1 or 2 C₁-C₆ alkyl groups, and —NR³—, wherein each R³ is a hydrogen atom or C₁-C₆ alkyl;
[0702] X⁵ is —(CH₂)_{b}—, wherein b is an integer between 0 and 6;
[0703] X⁶ is hydrogen, C₁-C₆ alkyl, 5- to 6-membered heteroaryl optionally substituted with 1 or 2 C₁-C₆ alkyl groups, or —NR⁴R⁵, wherein R⁴ and R⁵ are each independently hydrogen or C₁-C₆ alkyl; or alternatively R⁴ and R⁵ join together with the nitrogen to which they are bound to form a 4- to 7-membered heterocyclyl optionally substituted with 1 or 2 C₁-C₆ alkyl groups, wherein the heterocyclyl optionally includes an additional heteroatom selected from oxygen, sulfur, and nitrogen;
[0704] X⁷ is hydrogen or —NR⁶R⁷, wherein R⁶ and R⁷ are each independently hydrogen or C₁-C₆ alkyl; or alternatively R⁶ and R⁷ join together with the nitrogen to which they are bound to form a 4- to 7-membered heterocyclyl optionally substituted with 1 or 2 C₁-C₆ alkyl groups, wherein the heterocyclyl optionally includes an additional heteroatom selected from oxygen, sulfur, and nitrogen;
[0705] at least one of X¹, X², X³, X⁴, and X⁵ is present; and
[0706] provided that when either X¹ or X² is —O—, neither X³ nor X⁴ is

[chemical structure]

and when either X¹ or X² is —O—, R⁴ and R⁵ are not both ethyl.

### Exemplary Lipids of WO2022140239

[0707] In another aspect, an amino lipid is according to any formula or structure, or a pharmaceutically acceptable salt or solvate thereof, as described in International Publication No. WO2022140239, which is hereby incorporated by reference in its entirety. In some embodiments, an amino lipid has a structure according to any of Formulae I′ of WO2022140239, or a pharmaceutically acceptable salt or solvate thereof. Exemplary amino lipids also include any of the lipids represented by the Examples of WO2022140239.

[0708] In some embodiments, an amino lipid is according to a compound of Formula I′ of WO2022140239:

[chemical structure]

or its N-oxide, or a pharmaceutically acceptable salt thereof, wherein
[0709] L¹ is absent, C₁-6 alkylenyl, or C₂-6 heteroalkylenyl;
[0710] each L² is independently optionally substituted C₂₋₁₅ alkylenyl, or optionally substituted C₃₋₁₅ heteroalkylenyl;
[0711] L is absent, optionally substituted C₁₋₁₀ alkylenyl, or optionally substituted C₂₋₁₀ heteroalkylenyl;
[0712] L³ is absent, optionally substituted C₁₋₁₀ alkylenyl, or optionally substituted C₂₋₁₀ heteroalkylenyl;
[0713] X is absent, —OC(O)—, —C(O)O—, or —OC(O)O—;
[0714] each R is independently hydrogen,

[chemical structure]

or an optionally substituted group selected from C₆-20 aliphatic, 3- to 12-membered cycloaliphatic, 7- to 12-membered bridged bicyclic comprising 0-4 heteroatoms independently selected from nitrogen, oxygen, or sulfur, 1-adamantyl, 2-adamantyl, sterolyl, and phenyl;

[0715] R¹ is hydrogen, optionally substituted phenyl, optionally substituted 3- to 7-membered cycloaliphatic, optionally substituted 3- to 7-membered heterocyclyl comprising 1-3 heteroatoms independently selected from nitrogen, oxygen, and sulfur, optionally substituted 5- to 6-membered monocyclic heteroaryl comprising 1-4 heteroatoms independently selected from nitrogen, oxygen, and sulfur, optionally substituted 8- to 10-membered bicyclic heteroaryl comprising 1-4 heteroatoms independently selected from nitrogen, oxygen, and sulfur, —OR², —C(O)OR², —C(O) SR², —OC(O)R², —OC(O)OR², —CN, —N(R²)₂, —C(O)N(R²)₂, —S(O)₂N(R²)₂, —NR²C(O)R², —OC(O)N(R²)₂, —N(R²)C(O)OR², —NR²S(O)₂R², —NR²C(O)N(R²)₂, —NR²C(S)N(R²)₂, —NR²C(NR²)N(R²)₂, —NR²C(CHR²)N(R²)₂, —N(OR²)C(O)R², —N(OR²) S(O)₂R², —N(OR²)C(O)OR², —N(OR²)C(O)N(R²)₂, —N(OR²)C(S)N(R²)₂, —N(OR²)C(NR²)N(R²)₂, —N(OR²)C(CHR²)N(R²)₂, —C(NR²)N(R²)₂, —C(NR²)R², —C(O)N(R²)OR², —C(R²)N(R²)₂C(O)OR², —CR² (R³)₂, —OP(O)(OR²)₂, or —P(O)(OR²)₂; or
[0716] R¹ is

[chemical structure]

or a ring selected from 3- to 7-membered cycloaliphatic and 3- to 7-membered heterocyclyl comprising 1-3 heteroatoms independently selected from nitrogen, oxygen, and sulfur, wherein the cycloaliphatic or heterocyclyl ring is optionally substituted with 1-4 R² or R³ groups;
[0717] each R² is independently hydrogen,
   [0718] oxo, —CN, —NO₂, —OR⁴, —S(O)₂R⁴, —S(O)₂N(R⁴)₂, —(CH₂) n-R⁴, or an optionally substituted group selected from C₁-6 aliphatic, phenyl, 3- to 7-membered cycloaliphatic, 5- to 6-membered monocyclic heteroaryl comprising 1-4 heteroatoms independently selected from nitrogen, oxygen, and sulfur, and 3- to 7-membered heterocyclyl comprising 1-3 heteroatoms independently selected from nitrogen, oxygen, and sulfur; or
   [0719] two occurrences of R², taken together with the atom(s) to which they are attached, form optionally substituted 4- to 7-membered heterocyclyl comprising 0-1 additional heteroatom selected from nitrogen, oxygen, and sulfur;
[0720] each R³ is independently —(CH₂)ₙ—R⁴; or
   [0721] two occurrences of R³, taken together with the atom(s) to which they are attached, form optionally substituted 5- to 6-membered heterocyclyl comprising 0-1 additional heteroatom selected from nitrogen, oxygen, and sulfur;
[0722] each R⁴ is independently
[0723] hydrogen, —OR⁵, —N(R⁵)₂, —OC(O)R⁵, —OC(O)OR⁵, —CN, —C(O)N(R⁵)₂, —NR⁵C(O)R⁵, —OC(O)N(R⁵)₂, —N(R⁵)C(O)OR⁵, —NR⁵S(O)₂R⁵, —NR⁵° C. (O)N(R⁵)₂, —NR⁵C(S)N(R⁵)₂, —NR⁵C(NR⁵)N(R⁵)₂, or

[chemical structure]

[0724] each R⁵ is independently hydrogen, or optionally substituted C₁₋₆ aliphatic; or two occurrences of R⁵, taken together with the atom(s) to which they are attached, form optionally substituted 4- to 7-membered heterocyclyl comprising 0-1 additional heteroatom selected from nitrogen, oxygen, and sulfur;
[0725] each R⁶ is independently C₄-12 aliphatic; and
[0726] each n is independently 0 to 4.

### Exemplary Lipids of WO2022140238

[0727] In another aspect, an amino lipid is according to any formula or structure, or a pharmaceutically acceptable salt or solvate thereof, as described in International Publication No. WO2022140238, which is hereby incorporated by reference in its entirety. In some embodiments, an amino lipid has a structure according to any of Formulae I′ of WO2022140238, or a pharmaceutically acceptable salt or solvate thereof. Exemplary amino lipids also include any of the lipids represented by the Examples of WO2022140238.

[0728] In some embodiments, an amino lipid is according to a compound of Formula I′ of WO2022140238:

[chemical structure]

[0729] or its N-oxide, or a pharmaceutically acceptable salt thereof, wherein
[0730] L¹ is absent, C₁-6 alkylenyl, or C₂-6 heteroalkylenyl;
[0731] each L² is independently optionally substituted C₂₋₁₅ alkylenyl, or optionally substituted C₃₋₁₅ heteroalkylenyl;
[0732] L³ is absent, optionally substituted C₁₋₁₀ alkylenyl, or optionally substituted C₂₋₁₀ heteroalkylenyl;
[0733] X is absent, —OC(O)—, —C(O)O—, or —OC(O)O—;
[0734] each R′ is independently an optionally substituted group selected from C₄-12 aliphatic, 3- to 12-membered cycloaliphatic, 7- to 12-membered bridged bicyclic comprising 0-4 heteroatoms independently selected from nitrogen, oxygen, or sulfur, 1-adamantyl, 2-adamantyl, sterolyl, and phenyl;
[0735] R is hydrogen,

[chemical structure]

or an optionally substituted group selected from C₆-20 aliphatic, 3- to 12-membered cycloaliphatic, 7- to 12-membered bridged bicyclic comprising 0-4 heteroatoms independently selected from nitrogen, oxygen, or sulfur, 1-adamantyl, 2-adamantyl, sterolyl, and phenyl;
[0736] R¹ is hydrogen, optionally substituted phenyl, optionally substituted 3- to 7-membered cycloaliphatic, optionally substituted 3- to 7-membered heterocyclyl comprising 1-3 heteroatoms independently selected from nitrogen, oxygen, and sulfur, optionally substituted 5- to 6-membered monocyclic heteroaryl comprising 1-4 heteroatoms independently selected from nitrogen, oxygen, and sulfur, optionally substituted 8- to 10-membered bicyclic heteroaryl comprising 1-4 heteroatoms independently selected from nitrogen, oxygen, and sulfur, —OR², —C(O)OR², —C(O)SR², —OC(O)R², —OC(O)OR², —CN, —N(R²)₂, —C(O)N(R²)₂, —S(O)₂N(R²)₂, —NR²C(O)R², —OC(O)N(R²)₂, —N(R²)C(O)OR², —NR²S(O)₂R², —NR²C(O)N(R²)₂, —NR²C(S)N(R²)₂, —NR²C(NR²)N(R²)₂, —NR²C(CHR²)N(R²)₂, —N(OR²)C(O)R², —N(OR²) S(O)₂R², —N(OR²)C(O)OR², —N(OR²)C(O)N(R²)₂,
   [0737] —N(OR²)C(S)N(R²)₂, —N(OR²)C(NR²)N(R²)₂, —N(OR²)C(CHR²)N(R²)₂, —C(NR²)N(R²)₂, —C(NR²)R², —C(O)N(R²)OR², —C(R²)N(R²)₂C(O)OR², —CR² (R³)₂, —OP(O) (OR²)₂, or —P(O)(OR²)₂; or
[0738] R¹ is

[chemical structure]

or a ring selected from 3- to 7-membered cycloaliphatic and 3- to 7-membered heterocyclyl comprising 1-3 heteroatoms independently selected from nitrogen, oxygen, and sulfur, wherein the cycloaliphatic or heterocyclyl ring is optionally substituted with 1-4 R² or R³ groups;
[0739] each R² is independently hydrogen, oxo, —CN, —NO₂, —OR⁴, —S(O)₂R⁴, —S(O)₂N(R⁴)₂, —(CH₂) n-R⁴, or an optionally substituted group selected from C₁-6 aliphatic, phenyl, 3- to 7-membered cycloaliphatic, 5- to 6-membered monocyclic heteroaryl comprising 1-4 heteroatoms independently selected from nitrogen, oxygen, and sulfur, and 3- to 7-membered heterocyclyl comprising 1-3 heteroatoms independently selected from nitrogen, oxygen, and sulfur; or
   [0740] two occurrences of R², taken together with the atom(s) to which they are attached, form optionally substituted 4- to 7-membered heterocyclyl comprising 0-1 additional heteroatom selected from nitrogen, oxygen, and sulfur;
[0741] each R³ is independently-(CH₂) n-R⁴; or
   [0742] two occurrences of R³, taken together with the atom(s) to which they are attached, form optionally substituted 5- to 6-membered heterocyclyl comprising 0-1 additional heteroatom selected from nitrogen, oxygen, and sulfur;
[0743] each R⁴ is independently hydrogen, —OR⁵, —N(R⁵)₂, —OC(O)R⁵, —OC(O)OR⁵, —CN, —C(O)N(R⁵)₂,
   [0744] —NR⁵C(O)R⁵, —OC(O)N(R⁵)₂, —N(R⁵)C(O)OR⁵, —NR⁵S(O)₂R⁵, —NR⁵C(O)N(R⁵)₂,
   [0745] —NR⁵C(S)N(R⁵)₂, —NR⁵C(NR⁵)N(R⁵)₂, or

[chemical structure]

[0746] each R⁵ is independently hydrogen, or optionally substituted C₁₋₆ aliphatic; or
   [0747] two occurrences of R⁵, taken together with the atom(s) to which they are attached, form optionally substituted 4- to 7-membered heterocyclyl comprising 0-1 additional heteroatom selected from nitrogen, oxygen, and sulfur;
[0748] each R⁶ is independently C₄-12 aliphatic; and
[0749] each n is independently 0 to 4.

### Exemplary Lipids of WO2022159421

[0750] In another aspect, an amino lipid is according to any formula or structure, or a pharmaceutically acceptable salt or solvate thereof, as described in International Publication No. WO2022159421, which is hereby incorporated by reference in its entirety. In some embodiments, an amino lipid has a structure according to any of Formulae I of WO2022159421, or a pharmaceutically acceptable salt or solvate thereof. Exemplary amino lipids also include any of the lipids represented by the Examples of WO2022159421.

[0751] In some embodiments, an amino lipid is according to a compound of Formula I of WO2022159421:

[chemical structure]

[0752] or a pharmaceutically acceptable salt thereof, wherein:
[0753] L¹ is a covalent bond, —C(O)—, or —OC(O)—;
[0754] L² is a covalent bond, an optionally substituted bivalent saturated or unsaturated, straight or branched C₁-C₁₂ hydrocarbon chain, or

[chemical structure]

[0755] Cy^{A} is an optionally substituted ring selected from phenylene and 3- to 7-membered saturated or partially unsaturated carbocyclene;
[0756] each m is independently 0, 1, or 2;
[0757] L³ is a covalent bond, —C(O)—, —C(O)O—, —OC(O)—, —O—, or —OC(O)O—;
[0758] R¹ is

[chemical structure]

or an optionally substituted saturated or unsaturated, straight or branched C₁-C₂₀ hydrocarbon chain wherein 1-3 methylene units are optionally and independently replaced with —O— or —NR—;
[0759] Cy^{B} is an optionally substituted ring selected from 3- to 12-membered saturated or partially unsaturated carbocyclyl, 1-adamantyl, 2-adamantyl,

[chemical structure]

[0760] sterolyl, and phenyl;
[0761] p is 0, 1, 2, or 3;
[0762] X¹ is a covalent bond, —O—, or —NR—;
[0763] X² is a covalent bond or an optionally substituted, bivalent saturated or unsaturated, straight or branched, C₁-C₁₂ hydrocarbon chain, wherein 1-3 methylene units are optionally and independently replaced with —O—, —NR—, or —Cy^{C}—;
[0764] Cy^{C} is an optionally substituted ring selected from 3- to 7-membered saturated or partially unsaturated carbocyclene, phenylene, 3- to 7-membered saturated or partially unsaturated heterocyclene having 1-3 heteroatoms independently selected from nitrogen, oxygen, and sulfur, and 5- to 6-membered heteroarylene having 1-3 heteroatoms independently selected from nitrogen, oxygen, and sulfur;
[0765] X³ is hydrogen or an optionally substituted ring selected from 3- to 7-membered saturated or partially unsaturated carbocyclyl, phenyl, 3- to 7-membered saturated or partially unsaturated heterocyclyl having 1-3 heteroatoms independently selected from nitrogen, oxygen, and sulfur, or 5- to 6-membered heteroaryl having 1-3 heteroatoms independently selected from nitrogen, oxygen, and sulfur;
[0766] each R is independently hydrogen or an optionally substituted C₁-C₆ aliphatic group;
[0767] Z¹ is a covalent bond or —O—;
[0768] Z² is an optionally substituted group selected from 4- to 12-membered saturated or partially unsaturated carbocyclyl, phenyl, 1-adamantyl, and 2-adamantyl;
[0769] Z³ is hydrogen, or an optionally substituted group selected from C₁-C₁₀ aliphatic, and 4- to 12-membered saturated or partially unsaturated carbocyclyl; and
[0770] d is 0, 1, 2, 3, 4, 5, or 6;
[0771] provided that when L³ is a covalent bond, then R¹ must be

[chemical structure]

### Exemplary Lipids of WO2022159475

[0772] In another aspect, an amino lipid is according to any formula or structure, or a pharmaceutically acceptable salt or solvate thereof, as described in International Publication No. WO2022159475, which is hereby incorporated by reference in its entirety. In some embodiments, an amino lipid has a structure according to any of Formulae I of WO2022159475, or a pharmaceutically acceptable salt or solvate thereof. Exemplary amino lipids also include any of the lipids represented by the Examples of WO2022159475.

[0773] In some embodiments, an amino lipid is according to a compound of Formula I of WO2022159475:

[chemical structure]

[0774] or a pharmaceutically acceptable salt thereof, wherein:
[0775] each L¹ and L^{1′} is independently —C(O)— or —C(O)O—;
[0776] each L² and L^{2′} is independently a covalent bond, an optionally substituted bivalent saturated or unsaturated, straight or branched C₁-C₁₂ hydrocarbon chain, or

[chemical structure]

[0777] each Cy^{A} is independently an optionally substituted ring selected from phenylene and a 3- to 7-membered saturated or partially unsaturated carbocyclene;
[0778] each m is independently 0, 1, or 2;
[0779] each L³ and L^{3′} is independently a covalent bond, —C(O)O—, —OC(O)—, —O—, or —OC(O)O—;
[0780] each R¹ and R^{1′} is independently an optionally substituted group selected from a saturated or unsaturated, straight or branched C₁-C₂₀ hydrocarbon chain, wherein 1-3 methylene units are optionally and independently replaced with —O— or —NR—, a 3- to 12-membered saturated or partially unsaturated carbocyclic ring, 1-adamantyl, 2-adamantyl, sterolyl, phenyl, and

[chemical structure]

[0781] each L⁴ is independently a bivalent saturated or unsaturated, straight or branched C₁-C₆ hydrocarbon chain;
[0782] each A¹ and A² is independently an optionally substituted C₁-C₂₀ aliphatic or —L⁵-R⁵; or A¹ and A², together with their intervening atoms, may form an optionally substituted ring:

[chemical structure]

[0783] wherein
[0784] x is selected from 1 or 2; and
[0785] #represents the point of attachment to L⁴;
[0786] each L⁵ is independently a bivalent saturated or unsaturated, straight or branched C₁-C₂₀ hydrocarbon chain, wherein 1-3 methylene units are optionally and independently replaced with —O— or —NR—;
[0787] each R⁵ is independently an optionally substituted group selected from a 5- to 10-membered aryl ring and a 3- to 8-membered carbocyclic ring;
[0788] X¹ is a covalent bond, —O—, or —NR—;
[0789] X² is a covalent bond or an optionally substituted, bivalent saturated or unsaturated, straight or branched, C₁-C₁₂ hydrocarbon chain, wherein 1-3 methylene units are optionally and independently replaced with —O— or —NR—;
[0790] X³ is hydrogen or —Cy^{B};
[0791] Cy^{B} is an optionally substituted ring selected from 3- to 7-membered saturated or partially unsaturated carbocyclyl, phenyl, 3- to 7-membered saturated or partially unsaturated heterocyclyl having 1-3 heteroatoms independently selected from nitrogen, oxygen, and sulfur, and 5- to 6-membered heteroaryl having 1-3 heteroatoms independently selected from nitrogen, oxygen, and sulfur; and
[0792] each R is independently hydrogen or an optionally substituted C₁-C₆ aliphatic group;
[0793] provided that when X³ is hydrogen, at least one of R¹ or R^{1′} is

[chemical structure]

[0794] In some embodiments, the present disclosure provides a compound of Formula I or a pharmaceutically acceptable salt thereof, wherein:
[0795] each L¹ and L^{1′} is independently —C(O)— or —C(O)O—;
[0796] each L² and L^{2′} is independently a covalent bond, an optionally substituted bivalent saturated or unsaturated, straight or branched C₁-C₁₂ hydrocarbon chain, or

[chemical structure]

[0797] each Cy^{A} is independently an optionally substituted ring selected from phenylene and a 3- to 7-membered saturated or partially unsaturated carbocyclene;
[0798] each m is independently 0, 1, or 2;
[0799] each L³ and L^{3′} is independently a covalent bond, —C(O)O—, —OC(O)—, —O—, or —OC(O)O—;
[0800] each R¹ and R^{1′} is independently an optionally substituted group selected from a saturated or unsaturated, straight or branched C₁-C₂₀ hydrocarbon chain, wherein 1-3 methylene units are optionally and independently replaced with —O— or —NR—, a 3- to 7-membered saturated or partially unsaturated carbocyclic ring, 1-adamantyl, 2-adamantyl, sterolyl, phenyl, and

[chemical structure]

[0801] each L⁴ is independently a bivalent saturated or unsaturated, straight or branched C₁-C₆ hydrocarbon chain;
[0802] each A¹ and A² is independently an optionally substituted C₁-C₂₀ aliphatic or —L⁵-R⁵;
[0803] or A¹ and A², together with their intervening atoms, may form an optionally substituted ring:

[chemical structure]

[0804] wherein
[0805] x is selected from 1 or 2; and
[0806] #represents the point of attachment to L⁴;
[0807] each L⁵ is independently a bivalent saturated or unsaturated, straight or branched C₁-C₂₀ hydrocarbon chain, wherein 1-3 methylene units are optionally and independently replaced with —O— or —NR—;
[0808] each R⁵ is independently an optionally substituted group selected from a 5- to 10-membered aryl ring and a 3- to 8-membered carbocyclic ring;
[0809] X¹ is a covalent bond, —O—, or —NR—;
[0810] X² is a covalent bond or an optionally substituted, bivalent saturated or unsaturated, straight or branched, C₁-C₁₂ hydrocarbon chain, wherein 1-3 methylene units are optionally and independently replaced with —O— or —NR—;
[0811] X³ is hydrogen or —Cy^{B};
[0812] Cy^{B} is an optionally substituted ring selected from 3- to 7-membered saturated or partially unsaturated carbocyclyl, phenyl, 3- to 7-membered saturated or partially unsaturated heterocyclyl having 1-3 heteroatoms independently selected from nitrogen, oxygen, and sulfur, and 5- to 6-membered heteroaryl having 1-3 heteroatoms independently selected from nitrogen, oxygen, and sulfur; and
[0813] each R is independently hydrogen or an optionally substituted C₁-C₆ aliphatic group; provided that when X³ is hydrogen, at least one of R¹ or R^{1′} is

[chemical structure]

### Exemplary Lipids of WO2022159463

[0814] In another aspect, an amino lipid is according to any formula or structure, or a pharmaceutically acceptable salt or solvate thereof, as described in International Publication No. WO2022159463, which is hereby incorporated by reference in its entirety. In some embodiments, an amino lipid has a structure according to any of Formulae I of WO2022159463, or a pharmaceutically acceptable salt or solvate thereof. Exemplary amino lipids also include any of the lipids represented by the Examples of WO2022159463.

[0815] In some embodiments, an amino lipid is according to a compound of Formula I of WO2022159463:

[chemical structure]

[0816] or a pharmaceutically acceptable salt thereof, wherein:
[0817] each of L¹ and L^{1′} is independently a covalent bond, —C(O)—, or —OC(O)—;
[0818] each of L² and L^{2′} is independently a covalent bond, an optionally substituted bivalent saturated or unsaturated, straight or branched C₁-C₁₂ hydrocarbon chain, or

[chemical structure]

[0819] each Cy^{A} is independently an optionally substituted ring selected from phenylene or 3- to 7-membered saturated or partially unsaturated carbocyclene;
[0820] each m is independently 0, 1, or 2;
[0821] each of L³ and L^{3′} is independently a covalent bond, —O—, —C(O)O—, —OC(O)—, or —OC(O)O—;
[0822] each of R¹ and R^{1′} is independently an optionally substituted group selected from saturated or unsaturated, straight or branched C₁-C₂₀ hydrocarbon chain wherein 1-3 methylene units are optionally and independently replaced with —O— or —NR—, a 3- to 7-membered saturated or partially unsaturated carbocyclic ring, 1-adamantyl, 2-adamantyl, sterolyl, phenyl, or

[chemical structure]

[0823] each L⁴ is independently a bivalent saturated or unsaturated, straight or branched C₁-C₂₀ hydrocarbon chain;
[0824] each A¹ and A² is independently an optionally substituted C₁-C₂₀ aliphatic or —L⁵-R⁵,
[0825] or A¹ and A², together with their intervening atoms, may form an optionally substituted ring:

[chemical structure]

[0826] wherein
   [0827] x is selected from 1 or 2; and
   [0828] #represents the point of attachment to L⁴;
[0829] each L⁵ is independently a bivalent saturated or unsaturated, straight or branched C₁-C₂₀ hydrocarbon chain, wherein 1-3 methylene units are optionally and independently replaced with —O— or —NR—;
[0830] each R⁵ is independently an optionally substituted group selected from a 6- to 10-membered aryl ring or a 3- to 8-membered carbocyclic ring;
[0831] Y¹ is a covalent bond, —C(O)—, or —C(O)O—;
[0832] Y² is a bivalent saturated or unsaturated, straight or branched C₁-C₆ hydrocarbon chain, wherein 1-2 methylene units are optionally and independently replaced with cyclopropylene, —O—, or —NR—;
[0833] Y³ is an optionally substituted group selected from saturated or unsaturated, straight or branched C₁-C₁₄ hydrocarbon chain, wherein 1-3 methylene units are optionally and independently replaced with —O— or —NR—, a 3- to 7-membered saturated or partially unsaturated carbocyclic ring, 1-adamantyl, 2-adamantyl, or phenyl;
[0834] X¹ is a covalent bond, —O—, or —NR—;
[0835] X² is an optionally substituted bivalent saturated or unsaturated, straight or branched C₁-C₁₂ hydrocarbon chain, wherein 1-3 methylene units are optionally and independently replaced with —O—, —NR—, or —Cy^{B}—;
[0836] each Cy^{B} is independently an optionally substituted ring selected from 3- to 7-membered saturated or partially unsaturated carbocyclene, phenylene, 3- to 7-membered heterocyclene having 1-3 heteroatoms independently selected from nitrogen, oxygen, and sulfur, or 5- to 6-membered heteroarylene having 1-3 heteroatoms independently selected from nitrogen, oxygen, and sulfur;
[0837] X³ is hydrogen or an optionally substituted ring selected from 3- to 7-membered saturated or partially unsaturated carbocyclyl, phenyl, 3- to 7-membered heterocyclyl having 1-3 heteroatoms independently selected from nitrogen, oxygen, and sulfur, or 5- to 6-membered heteroaryl having 1-3 heteroatoms independently selected from nitrogen, oxygen, and sulfur; and
[0838] each R is independently hydrogen or an optionally substituted C₁-C₆ aliphatic group.

### LNP Compositions Comprising Different Amino Lipids

[0839] In some embodiments, the LNP comprises a plurality of amino lipids having different formulas. For example, the LNP composition can comprise 2, 3, 4, 5, 6.7, 8, 9. 10, or more amino lipids. For another example, the LNP composition can comprise at least 2, at least 3, at least 4, at least 5, at least 6, at least 7, at least 9, at least 10, or at least 20 amino lipids. For yet another example, the LNP composition can comprise at most 2, at most 3, at most 4, at most 5, at most 6, at most 7, at most 9, at most 10, at most 20, or at most 30 amino lipids.

[0840] In some embodiments, the LNP composition comprises a first amino lipid. In some embodiments, the LNP composition comprises a first amino lipid and a second amino lipid. In some embodiments, the LNP composition comprises a first amino lipid, a second amino lipid, and a third amino lipid. In some embodiments, the LNP composition comprises a first amino lipid, a second amino lipid, a third amino lipid, and a fourth amino lipid. In some embodiments, the LNP composition does not comprise a fourth amino lipid. In some embodiments, the LNP composition does not comprise a third amino lipid. In some embodiments, a molar ratio of the first amino lipid to the second amino lipid is from about 0.1 to about 10. In some embodiments, a molar ratio of the first amino lipid to the second amino lipid is from about 0.20 to about 5. In some embodiments, a molar ratio of the first amino lipid to the second amino lipid is from about 0.25 to about 4. In some embodiments, a molar ratio of the first amino lipid to the second amino lipid is about 0.25, about 0.33, about 0.5, about 1, about 2, about 3, or about 4.

[0841] In some embodiments, a molar ratio of the first amino lipid: the second amino lipid: the third amino lipid is about 4:1:1. In some embodiments, a molar ratio of the first amino lipid: the second amino lipid: the third amino lipid is about 1:1:1. In some embodiments, a molar ratio of the first amino lipid: the second amino lipid: the third amino lipid is about 2:1:1. In some embodiments, a molar ratio of the first amino lipid: the second amino lipid: the third amino lipid is about 2:2:1. In some embodiments, a molar ratio of the first amino lipid: the second amino lipid: the third amino lipid is about 3:2:1. In some embodiments, a molar ratio of the first amino lipid: the second amino lipid: the third amino lipid is about 3:1:1. In some embodiments, a molar ratio of the first amino lipid: the second amino lipid: the third amino lipid is about 5:1:1. In some embodiments, a molar ratio of the first amino lipid: the second amino lipid: the third amino lipid is about 3:3:1. In some embodiments, a molar ratio of the first amino lipid: the second amino lipid: the third amino lipid is about 4:4:1.

### Additional Amino Lipid Embodiments

[0842] In some embodiments, the LNP composition comprises one or more amino lipids. In some embodiments, the one or more amino lipids comprise from about 40 mol % to about 65 mol % of the total lipid present in the particle. In some embodiments, the one or more amino lipids comprise about 40 mol %, about 41 mol %, about 42 mol %, about 43 mol %, about 44 mol %, about 45 mol %, about 46 mol %, about 47 mol %, about 48 mol %, about 49 mol %, about 50 mol %, about 51 mol %, about 52 mol %, about 53 mol %, about 54 mol %, about 55 mol %, about 56 mol %, about 57 mol %, about 58 mol %, about 59 mol %, about 60 mol %, about 61 mol %, about 62 mol %, about 63 mol %, about 64 mol %, or about 65 mol % of the total lipid present in the particle. In some embodiments, the first amino lipid comprises from about 1 mol % to about 99 mol % of the total amino lipids present in the particle. In some embodiments, the first amino lipid comprises from about 16.7 mol % to about 66.7 mol % of the total amino lipids present in the particle. In some embodiments, the first amino lipid comprises from about 20 mol % to about 60 mol % of the total amino lipids present in the particle.

[0843] In some embodiments, the amino lipid is an ionizable lipid. An ionizable lipid can comprise one or more ionizable nitrogen atoms. In some embodiments, at least one of the one or more ionizable nitrogen atoms is positively charged. In some embodiments, at least 10 mol %, 20 mol %, 30 mol %, 40 mol %, 50 mol %, 60 mol %, 70 mol %, 80 mol %. 90 mol %, 95 mol %, or 99 mol % of the ionizable nitrogen atoms in the LNP composition are positively charged. In some embodiments, the amino lipid comprises a primary amine, a secondary amine, a tertiary amine, an imine, an amide, a guanidine moiety, a histidine residue, a lysine residue, an arginine residue, or any combination thereof. In some embodiments, the amino lipid comprises a primary amine, a secondary amine, a tertiary amine, a guanidine moiety, or any combination thereof. In some embodiments, the amino lipid comprises a tertiary amine.

[0844] In some embodiments, the amino lipid (e.g. an ionizable lipid) is a cationic lipid. In some embodiments, the cationic lipid is an ionizable lipid. In some embodiments, the amino lipid comprises one or more nitrogen atoms. In some embodiments, the amino lipid comprises one or more ionizable nitrogen atoms. Exemplary cationic and/or ionizable lipids include, but are not limited to, 3-(didodecylamino)-N1,N1,4-tri dodecyl-1-piperazineethan amine (KL10), N142-(didodecylamino) ethyl]-N1,N4,N4-tridodecyl-1,4-piperazinediethanamine (KL22), 14,25-ditridecyl-15,18,21,24-tetraaza-octatriacontane (KL25), 1,2-dilinoleyloxy-N,N-dimethylaminopropane (DLin-DMA), 2,2-dilinoley 1-4-dimethylaminomethyl-[1,3]-dioxolane (DLin-K-DMA), heptatriaconta-6,9,28,31-tetraen-19-y1 4-(dimethylamino) butanoate (DLin-MC 3-DMA), 2,2-dilinoley 1-4-(2-dimethylaminoethyl)-[1,3]-dioxolane (DLin-KC2-DMA), 1,2-dioleyloxy-N,N-dimethylaminopropane (DODMA), 2-({8-[(3B)-cholest-5-en-3-yloxy]octyl}oxy)-N,N-dimethy 1-3-[(9Z,12Z)-octadeca-9,12-dien-1-yloxy]propan-1-amine (Octyl-CLinDMA), (2R)-2-({8-[(3B)-cholest-5-en-3-yloxy]octyl}oxy)-N,N-dimethy 1-3-[(9Z,12Z)-octadeca-9,12-dien-1-yloxy]propan-1-amine (Octyl-CLinDMA (2R)), and (2S)-2-({8-[(3B)-cholest-5-en-3-yloxy]octyl}oxy)—N,N-dimethy 1-3-[(9Z,12Z)-octadeca-9,12-dien-1-yloxy]propan-1-amine (Octyl-CLinDMA (2S)).

[0845] In some embodiments, an amino lipid described herein can take the form of a salt, such as a pharmaceutically acceptable salt. All pharmaceutically acceptable salts of the amino lipid are encompassed by this disclosure. As used herein, the term “amino lipid” also includes its pharmaceutically acceptable salts, and its diastereomeric, enantiomeric, and epimeric forms.

[0846] In some embodiments, an amino lipid described herein, possesses one or more stereocenters and each stereocenter exists independently in either the R or S configuration. The lipids presented herein include all diastereomeric, enantiomeric, and epimeric forms as well as the appropriate mixtures thereof. The lipids provided herein include all cis. trans, syn, anti, entgegen (E), and zusammen (Z) isomers as well as the appropriate mixtures thereof. In certain embodiments, lipids described herein are prepared as their individual stereoisomers by reacting a racemic mixture of the compound with an optically active resolving agent to form a pair of diastereoisomeric compounds/salts, separating the diastereomers and recovering the optically pure enantiomers. In some embodiments, resolution of enantiomers is carried out using covalent diastereomeric derivatives of the compounds described herein. In another embodiment, diastereomers are separated by separation/resolution techniques based upon differences in solubility. In other embodiments, separation of stereoisomers is performed by chromatography or by the forming diastereomeric salts and separation by recrystallization, or chromatography, or any combination thereof. Jean Jacques, Andre Collet, Samuel H. Wilen, “Enantiomers, Racemates and Resolutions”, John Wiley and Sons, Inc., 1981. In one aspect, stereoisomers are obtained by stereoselective synthesis.

[0847] In some embodiments, the lipids such as the amino lipids are substituted based on the structures disclosed herein. In some embodiments, the lipids such as the amino lipids are unsubstituted. In another embodiment, the lipids described herein are labeled isotopically (e.g., with a radioisotope) or by another other means, including, but not limited to, the use of chromophores or fluorescent moieties, bioluminescent labels, or chemiluminescent labels.

[0848] Lipids described herein include isotopically-labeled compounds, which are identical to those recited in the various formulae and structures presented herein, but for the fact that one or more atoms are replaced by an atom having an atomic mass or mass number different from the atomic mass or mass number usually found in nature. Examples of isotopes that can be incorporated into the present lipids include isotopes of hydrogen, carbon, nitrogen, oxygen, sulfur, fluorine, and chlorine, such as, for example, ²H, ³H, ¹³C, ¹⁴C, ¹⁵N, ¹⁸O, ¹⁷O, ³⁵S, ¹⁸F, ³⁶Cl. In one aspect, isotopically-labeled lipids described herein, for example those into which radioactive isotopes such as ³H and ¹⁴C are incorporated, are useful in drug and/or substrate tissue distribution assays. In one aspect, substitution with isotopes such as deuterium affords certain therapeutic advantages resulting from greater metabolic stability, such as, for example, increased in vivo half-life or reduced dosage requirements.

[0849] In some embodiments, the asymmetric carbon atom of the amino lipid is present in enantiomerically enriched form. In certain embodiments, the asymmetric carbon atom of the amino lipid has at least 50% enantiomeric excess, at least 60% enantiomeric excess, at least 70% enantiomeric excess, at least 80% enantiomeric excess, at least 90% enantiomeric excess, at least 95% enantiomeric excess, or at least 99% enantiomeric excess in the(S)- or (R)-configuration.

[0850] In some embodiments, the disclosed amino lipids can be converted to N-oxides. In some embodiments, N-oxides are formed by a treatment with an oxidizing agent (e.g., 3-chloroperoxybenzoic acid and/or hydrogen peroxides). Accordingly, disclosed herein are N-oxide compounds of the described amino lipids, when allowed by valency and structure, which can be designated as NO or N⁺—O⁻. In some embodiments, the nitrogen in the compounds of the disclosure can be converted to N-hydroxy or N-alkoxy. For example, N-hydroxy compounds can be prepared by oxidation of the parent amine by an oxidizing agent such as ra-CPBA. All shown nitrogen-containing compounds are also considered. Accordingly, also disclosed herein are N-hydroxy and N-alkoxy (e.g., N—OR, wherein R is substituted or unsubstituted C₁-C₆ alkyl, C₁-C₆ alkenyl, C₁-C₆ alkynyl, 3-14-membered carbocycle or 3-14-membered heterocycle) derivatives of the described amino lipids.

[0851] In some embodiments, the one or more amino lipids comprise from about 40 mol % to about 65 mol % of the total lipid present in the particle.

### PEG-Lipids

[0852] In some embodiments, the described LNP composition includes one or more PEG-lipids. As used herein, a “PEG lipid” or “PEG-lipid” refers to a lipid comprising a polyethylene glycol component. Examples of suitable PEG-lipids also include, but are not limited to, PEG-modified phosphatidylethanolamines, PEG-modified phosphatidic acids, PEG-modified ceramides, PEG-modified dialkylamines, PEG-modified diacylglycerols, PEG-modified dialkylglycerols, and mixtures thereof. For example, the one or more PEG-lipids can comprise PEG-c-DOMG, PEG-DMG, PEG-DLPE, PEG-DMPE, PEG-DPPC, a PEG-DSPE lipid, or a combination thereof.

[0853] In some embodiments, PEG-lipid comprises from about 0.1 mol % to about 10 mol % of the total lipid present in the particle.

### Phospholipid

[0854] In some embodiments, the described LNP composition includes one or more phospholipids.

[0855] In some embodiments, the phospholipid comprises from about 5 mol % to about 15 mol % of the total lipid present in the particle.

### Cholesterol

[0856] In some embodiments, the LNP composition includes a cholesterol or a derivative thereof.

### GalNAc-Lipid

[0857] In some embodiments, the LNP composition includes a receptor targeting conjugate comprising a compound formula (V),

[chemical structure]

[0858] wherein,
[0859] a plurality of the A groups collectively comprise a receptor targeting ligand;
[0860] each L¹, L², L³, L⁴, L⁵, L⁶, L⁷, L⁸, L⁹, L¹⁰ and L¹² is independently substituted or unsubstituted C₁-C₁₂ alkylene, substituted or unsubstituted C₁-C₁₂ heteroalkylene, substituted or unsubstituted C₂-C₁₂ alkenylene, substituted or unsubstituted C₂-C₁₂ alkynylene, —(CH₂CH₂O)ₘ—, —(OCH2CH₂)ₘ—, —O—, —S—, —S(═O)—, —S(═O)₂—, —S(═O) (═NR¹)—, —C(═O)—, —C(═N—OR¹)—, —C(═O)O—, —OC(═O)—, —C(═O)C(═O)—, —C(═O)NR¹—, —NR¹C(═O)—, —OC(═O)NR¹—, —NR¹C(═O)O—, —NR¹C(═O)NR¹—, —C(═O)NR¹C(═O)—, —S(═O)₂NR¹—, —NR¹S(═O)₂—, —NR¹—, or —N(OR¹)—;
[0861] L¹¹ is substituted or unsubstituted —(CH₂CH₂O)ₙ—, substituted or unsubstituted —(OCH₂CH₂)ₙ— or substituted or unsubstituted —(CH₂)ₙ—;
[0862] each R¹ is independently H or substituted or unsubstituted C₁-C₆alkyl;
[0863] R is a lipid, nucleic acid, amino acid, protein, or lipid nanoparticle;
[0864] m is an integer selected from 1 to 10; and
[0865] n is an integer selected from 1 to 200.

[0866] In some embodiments, each L¹, L⁴, and L⁷ is independently substituted or unsubstituted C₁-C₁₂ alkylene. In some embodiments, each L¹, L⁴, and L⁷ is independently substituted or unsubstituted C₂-C₆ alkylene. In some embodiments, each L¹, L⁴, and L⁷ is C₄ alkylene. In some embodiments, each L², L⁵, and L⁸ is independently —C(═O)NR¹—, —NR¹C(═O)—, —OC(═O)NR¹—, —NR¹C(═O)O—, —NR¹C(═O)NR¹—, or —C(═O)NR¹C(═O)—. In some embodiments, each L², L⁵, and L⁸ is independently-C(═O)NR¹— or —NR¹C(═O)—. In some embodiments, each L², L⁵, and L⁸ is —C(═O) NH—. In some embodiments, each L³, L⁶, and L⁹ is independently substituted or unsubstituted C₁-C₁₂ alkylene. In some embodiments, each L³ is substituted or unsubstituted C₂-C₆ alkylene. In some embodiments, L³ is C₄ alkylene. In some embodiments, each L⁶ and L′ is independently substituted or unsubstituted C₂-C₁₀ alkylene. In some embodiments, each L⁶ and L′ is independently substituted or unsubstituted C₂-C₆ alkylene. In some embodiments, each L⁶ and L′ is C₃ alkylene. In some embodiments, A binds to a lectin. In some embodiments, the lectin is an asialoglycoprotein receptor (ASGPR). In some embodiments, A is N-acetylgalactosamine (GalNAc) or

[chemical structure]

or a derivative thereof. A is N-acetylgalactosamine (GalNAc)

[chemical structure]

or a derivative thereof.

[0867] In some embodiments, the receptor targeting conjugate comprises from about 0.001 mol % to about 20 mol % of the total lipid content present in the nanoparticle composition.

### Phosphate Charge Neutralizer

[0868] In some embodiments, the LNP described herein includes a phosphate charge neutralizer. In some embodiments, the phosphate charge neutralizer comprises arginine, asparagine, glutamine, lysine, histidine, cationic dendrimers, polyamines, or a combination thereof. In some embodiments, the phosphate charge neutralizer comprises one or more nitrogen atoms. In some embodiments, the phosphate charge neutralizer comprises a polyamine.

[0869] Suitable phosphate charge neutralizers to be used in LNP formulations, set forth below, for example include, but are not limited to, Spermidine and 1,3-propanediamine.

### Antioxidants

[0870] In some embodiments, the LNP described herein includes one or more antioxidants. In some embodiments, the one or more antioxidants function to reduce a degradation of the cationic lipids, the payload, or both. In some embodiments, the one or more antioxidants comprise a hydrophilic antioxidant. In some embodiments, the one or more antioxidants is a chelating agent such as ethylenediaminetetraacetic acid (EDTA) and citrate. In some embodiments, the one or more antioxidants comprise a lipophilic antioxidant. In some embodiments, the lipophilic antioxidant comprises a vitamin E isomer or a polyphenol. In some embodiments, the one or more antioxidants are present in the LNP composition at a concentration of at least 1 mM, at least 10 mM, at least 20 mM, at least 50 mM, or at least 100 mM. In some embodiments, the one or more antioxidants are present in the particle at a concentration of about 20 mM.

### Other Lipids

[0871] In some embodiments, the disclosed LNP compositions may comprise a helper lipid. In some embodiments, the disclosed LNP compositions comprise a neutral lipid. In some embodiments, the disclosed LNP compositions comprise a stealth lipid. In some embodiments, the disclosed LNP compositions comprises additional lipids. Neutral lipids can function to stabilize and improve processing of the LNPs.

[0872] “Helper lipids” can refer to lipids that enhance transfection (e.g., transfection of the nanoparticle (LNP) comprising the composition as provided herein, including the biologically active agent). The mechanism by which the helper lipid enhances transfection includes enhancing particle stability. In some embodiments, the helper lipid enhances membrane fusogenicity. Helper lipids can include steroids, sterols, and alkyl resorcinols. Helper lipids suitable for use in the present disclosure can include, but are not limited to, cholesterol, 5-heptadecylresorcinol, and cholesterol hemisuccinate. In some embodiments, the helper lipid is cholesterol. In some embodiments, the helper lipid may be cholesterol hemisuccinate.

[0873] “Stealth lipids” can refer to lipids that alter the length of time the nanoparticles can exist in vivo (e.g., in the blood). Stealth lipids can assist in the formulation process by, for example, reducing particle aggregation and controlling particle size. Stealth lipids used herein may modulate pharmacokinetic properties of the LNP. Stealth lipids suitable for use in a lipid composition of the disclosure can include, but are not limited to, stealth lipids having a hydrophilic head group linked to a lipid moiety. Stealth lipids suitable for use in a lipid composition of the present disclosure and information about the biochemistry of such lipids can be found in Romberg et al, Pharmaceutical Research, Vol. 25, No. 1, 2008, pg. 55-71 and I-Toekstra et al, Biochimica et Biophysica Acta 1660 (2004) 41-52. Additional suitable PEG lipids are disclosed, e.g., in WO 2006/007712.

[0874] In some embodiments, the stealth lipid is a PEG-lipid. In one embodiment, the hydrophilic head group of stealth lipid comprises a polymer moiety selected from polymers based on PEG (sometimes referred to as poly (ethylene oxide)), poly (oxazoline), poly(vinyl alcohol), poly(glycerol), poly(N-vinylpyrrolidone), polyaminoacids and poly N-(2-hydroxypropyl)methacrylamide]. Stealth lipids can comprise a lipid moiety. In some embodiments, the lipid moiety of the stealth lipid may be derived from diacylglycerol or diacylglycamide, including those comprising a dialkylglycerol or dialkylglycamide group having alkyl chain length independently comprising from about C4 to about C40 saturated or unsaturated carbon atoms, wherein the chain may comprise one or more functional groups such as, for example, an amide or ester. The dialkylglycerol or dialkylglycamide group can further comprise one or more substituted alkyl groups.

[0875] The structures and properties of helper lipids, neutral lipids, stealth lipids, and/or other lipids are further described in WO2017173054A1, WO2019067999A1, US20180290965A1, US20180147298A1, US20160375134A1, U.S. Pat. Nos. 8,236,770, 8,021,686, 8,236,770B2, U.S. Pat. No. 7,371,404B2, U.S. Pat. No. 7,780,983B2, U.S. Pat. No. 7,858,117B2, US20180200186A1, US20070087045A1, WO2018119514A1, and WO2019067992A1, all of which are hereby incorporated by reference in their entirety.

### LNP Formulations

[0876] Particular formulation of a nanoparticle composition comprising one or more described lipids is described herein.

[0877] The described nanoparticle compositions are capable of delivering a therapeutic agent such as an RNA to a particular cell, tissue, organ, or system or group thereof in a mammal's body. Physiochemical properties of nanoparticle compositions may be altered in order to increase selectivity for particular bodily targets. For instance, particle sizes may be adjusted based on the fenestration sizes of different organs. The therapeutic agent included in a nanoparticle composition may also be selected based on the desired delivery target or targets. For example, a therapeutic agent may be selected for a particular indication, condition, disease, or disorder and/or for delivery to a particular cell, tissue, organ, or system or group thereof (e.g., localized, or specific delivery). In certain embodiments, a nanoparticle composition may include an mRNA encoding a polypeptide of interest capable of being translated within a cell to produce the polypeptide (e.g., base editor) of interest. Such a composition are capable of having specificity or affinity to a particular organ or cell type to facilitate drug substance delivery thereto, for example the liver or hepatocytes.

[0878] The amount of a therapeutic agent or drug substance (e.g., the mRNA that encodes for the base editor and the guide RNA) in an LNP composition may depend on the size, composition, desired target and/or application, or other properties of the nanoparticle composition. For example, the amount of an RNA comprised in a nanoparticle composition may depend on the size, sequence, and other characteristics of the RNA. The relative amounts of a therapeutic agent and other elements (e.g., lipids) in a nanoparticle composition may also vary. In some embodiments, the wt/wt ratio of the lipid component to a therapeutic agent in a nanoparticle composition may be from about 5:1 to about 60:1, such as about 5:1. 6:1, 7:1, 8:1, 9:1, 10:1, 11:1, 12:1, 13:1, 14:1, 15:1, 16:1, 17:1, 18:1, 19:1, 20:1, 25:1, 30:1, 35:1, 40:1, 45:1, 50:1, and 60:1. For example, the wt/wt ratio of the lipid component to a therapeutic agent may be from about 10:1 to about 40:1. In certain embodiments, the wt/wt ratio is about 20:1. The amount of a therapeutic agent in a nanoparticle composition can be measured using absorption spectroscopy (e.g., ultraviolet-visible spectroscopy).

[0879] In some embodiments, an LNP formulation comprises one or more nucleic acids such as RNAs. In some embodiments, the one or more RNAs, lipids, and amounts thereof may be selected to provide a specific N/P ratio. The N/P ratio can be selected from about 1 to about 30. The N/P ratio can be selected from about 2 to about 12. In some embodiments, the N/P ratio is from about 0.1 to about 50. In some embodiments, the N/P ratio is from about 2 to about 8. In some embodiments, the N/P ratio is from about 2 to about 15, from about 2 to about 10, from about 2 to about 8, from about 2 to about 6, from about 3 to about 15, from about 3 to about 10, from about 3 to about 8, from about 3 to about 6, from about 4 to about 15, from about 4 to about 10, from about 4 to about 8, or from about 4 to about 6. In some embodiments, the N/P ratio is about 2, about 2.5, about 3, about 3.5, about 4, about 4.5, about 5, about 5.5, about 6, about 6.5, about 7, about 7.5, about 8, about 9, or about 10. In some embodiments, the N/P ratio is from about 4 to about 6. In some embodiments, the NIP ratio is about 4, about 4.5, about 5, about 5.5, or about 6.

[0880] As used herein, the “N/P ratio” is the molar ratio of ionizable (e.g., in the physiological pH range) nitrogen atoms in a lipid (or lipids) to phosphate groups in a nucleic acid molecular entity (or nucleic acid molecular entities), e.g., in a nanoparticle composition comprising a lipid component and an RNA. Ionizable nitrogen atoms can include, for example, nitrogen atoms that can be protonated at about pH 1, about pH 2, about pH 3, about pH 4, about pH 4.5, about pH 5, about pH 5.5, about pH 6, about pH 6.5, about pH 7, about pH 7.5, or about pH 8 or higher. The physiological pH range can include, for example, the pH range of different cellular compartments (such as organs, tissues, and cells) and bodily fluids (such as blood, CSF, gastric juice, milk, bile, saliva, tears, and urine). In certain specific embodiments, the physiological pH range refers to the pH range of blood in a mammal, for example, from about 7.35 to about 7.45. Similarly, for phosphate charge neutralizers that have one or more ionizable nitrogen atoms, the N/P ratio can refer to a molar ratio of ionizable nitrogen atoms in the phosphate charge neutralizer to the phosphate groups in a nucleic acid. In some embodiments, ionizable nitrogen atoms refer to those nitrogen atoms that are ionizable within a pH range between 5 and 14.

[0881] For the payload that does not contain a phosphate group, the N/P ratio can refer to a molar ratio of ionizable nitrogen atoms in a lipid to the total negative charge in the payload. For example, the N/P ratio of an LNP composition can refer to a molar ratio of the total ionizable nitrogen atoms in the LNP composition to the total negative charge in the payload that is present in the composition.

[0882] In some embodiments, the LNPs are formed with an average encapsulation efficiency ranging from about 50% to about 70%, from about 70% to about 90%, or from about 90% to about 100%. In some embodiments, the LNPs are formed with an average encapsulation efficiency ranging from about 75% to about 98%.

[0883] In another aspect, provided herein is a lipid nanoparticle (LNP) comprising the composition as provided herein. As used herein, a “lipid nanoparticle (LNP) composition” or a “nanoparticle composition” is a composition comprising one or more described lipids. LNP compositions are typically sized on the order of micrometers or smaller and may include a lipid bilayer. Nanoparticle compositions encompass lipid nanoparticles (LNPs), liposomes (e.g., lipid vesicles), and lipoplexes. In some embodiments, a LNP refers to any particle that has a diameter of less than 1000 nm, 500 nm, 250 nm, 200 nm, 150 nm, 100 nm, 75 nm, 50 nm, or 25 nm. In some embodiments, a nanoparticle may range in size from 1-1000 nm, 1-500 nm, 1-250 nm, 25-200 nm, 40-100 nm, 50-100 nm. 50-90 nm, 50-80 nm, 50-70 nm, 55-95 nm, 55-80 nm, 55-75 nm, 60-100 nm, 60-90 nm, 60-80 nm, 60-70 nm, 25-100 nm, 25-80 nm, or 40-80 nm.

[0884] In some embodiments, an LNP may be made from cationic, anionic, or neutral lipids. In some embodiments, an LNP may comprise neutral lipids, such as the fusogenic phospholipid 1,2-dioleoyl-sn-glycero-3-phosphoethanolamine (DOPE) or the membrane component cholesterol, as helper lipids to enhance transfection activity and nanoparticle stability. In some embodiments, an LNP may comprise hydrophobic lipids, hydrophilic lipids, or both hydrophobic and hydrophilic lipids. Any lipid or combination of lipids that are known in the art can be used to produce an LNP. Examples of lipids used to produce LNPs include, but are not limited to DOTMA (N [1-(2,3-dioleyloxy) propyl]-N,N,N-trimethylammonium chloride), DOSPA (N,N-dimethyl-N-([2-sperminecarboxamido] ethyl)-2,3-bis (dioleyloxy)-1-propaniminium pentahydrochloride), DOTAP(1,2-Dioleoyl-3-trimethylammonium propane), DMRIE (N-(2-hydroxyethyl)-N,N-dimethyl-2,3-bis (tetradecyloxy-1-propanaminiumbromide), DC-cholesterol (3B-[N-(N′,N′-dimethylaminoethane)-carbamoyl] cholesterol), DOTAP-cholesterol, GAP-DMORIE-DPyPE, and GL67A-DOPE-DMPE 1,2-Bis (dimethylphosphino) ethane)-polyethylene glycol (PEG). Examples of cationic lipids include, but are not limited to, 98N12-5, C12-200, DLin-KC2-DMA (KC2), DLin-MC3-DMA (MC3), XTC, MD1, and 7C1. Examples of neutral lipids include, but are not limited to, DPSC, DPPC(Dipalmitoylphosphatidylcholine), POPC(1-palmitoyl-2-oleoyl-sn-glycero-3-phosphocholine), DOPE, and SM (sphingomyelin). Examples of PEG-modified lipids include, but are not limited to, PEG-DMG (Dimyristoyl glycerol), PEG-CerC14, and PEG-CerC20. In some embodiments, the lipids may be combined in any number of molar ratios to produce an LNP. In some embodiments, the polynucleotide may be combined with lipid(s) in a wide range of molar ratios to produce an LNP.

[0885] The definitions of terms in the following eight paragraphs apply only the compounds of exemplary lipids described in WO2022140252, WO2022159472, WO 2021141969, WO2021113365, WO2022140239, WO2022140238, WO2022159421, WO2022159475, and WO2022159463 above.

[0886] The term “substituted”, unless otherwise indicated, refers to the replacement of one or more hydrogen radicals in a given structure with the radical of a specified substituent including, but not limited to: halo, alkyl, alkenyl, alkynyl, aryl, heterocyclyl, thiol, alkylthio, oxo, thioxy, arylthio, alkylthioalkyl, arylthioallcyl, alkylsulfonyl, alkylsulfonylalkyl, arylsulfonylalkyl, alkoxy, aryloxy, aralkoxy, aminocarbonyl, alkylaminocarbonyl, aiylaminocarbonyl, alkoxycarbonyl, aryloxycarbonyl, haloalkyl, amino, trifluoromethyl, cyano, nitro, alkylamino, arylamino, alkylaminoalkyl, arylaminoalkyl, aminoalkylamino, hydroxy, alkoxyalkyl, carboxyalkyl, alkoxycarbonylalkyl, aminocarbonylalkyl, acyl, aralkoxycarbonyl, carboxylic acid, sulfonic acid, sulfonyl, phosphonic acid, aryl, heteroaryl, heterocyclic, and an aliphatic group. It is understood that the substituent may be further substituted. Exemplary substituents include amino, alkylamino, and the like.

[0887] As used herein, the term “substituent” means positional variables on the atoms of a core molecule that are substituted at a designated atom position, replacing one or more hydrogens on the designated atom, provided that the designated atom's normal valency is not exceeded, and that the substitution results in a stable compound. Combinations of substituents and/or variables are permissible only if such combinations result in stable compounds. A person of ordinary skill in the art should note that any carbon as well as heteroatom with valences that appear to be unsatisfied as described or shown herein is assumed to have a sufficient number of hydrogen atom(s) to satisfy the valences described or shown. In certain instances, one or more substituents having a double bond (e.g., “oxo” or “═O”) as the point of attachment may be described, shown, or listed herein within a substituent group, wherein the structure may only show a single bond as the point of attachment to the core structure of Formula (I). A person of ordinary skill in the art would understand that, while only a single bond is shown, a double bond is intended for those substituents.

[0888] The term “alkyl” refers to a straight or branched hydrocarbon chain radical, having from one to twenty carbon atoms, and which is attached to the rest of the molecule by a single bond. An alkyl comprising up to 10 carbon atoms is referred to as a C₁-C₁₀ alkyl, likewise, for example, an alkyl comprising up to 6 carbon atoms is a C₁-C₆ alkyl. Alkyls (and other moieties defined herein) comprising other numbers of carbon atoms are represented similarly. Alkyl groups include, but are not limited to, C₁-C₁₀ alkyl, C₁-C₉ alkyl, C₁-C₈ alkyl. C₁-C₇ alkyl, C₁-C₆ alkyl, C₁-C₈alkyl, C₁-C₄ alkyl, C₁-C₃ alkyl, C₁-C₂ alkyl, C₂-C₅ alkyl, C₃-C₈ alkyl and C₄-C₈ alkyl. Representative alkyl groups include, but are not limited to, methyl, ethyl, n-propyl, 1-methylethyl (i-propyl), n-butyl, i-butyl, s-butyl, n-pentyl, 1,1-dimethylethyl (t-butyl), 3-methylhexyl, 2-methylhexyl, 1-ethyl-propyl, and the like. In some embodiments, the alkyl is methyl or ethyl. In some embodiments, the alkyl is —CH (CH₃)₂ or —C(CH₃)₃. Unless stated otherwise specifically in the specification, an alkyl group may be optionally substituted as described below. “Alkylene” or “alkylene chain” refers to a straight or branched divalent hydrocarbon chain linking the rest of the molecule to a radical group. In some embodiments, the alkylene is —CI-12—, —CH₂CH₂—, or —CH₂CH₂CH₂—. In some embodiments, the alkylene is —CH₂—. In some embodiments, the alkylene is —CH₂CH₂—. In some embodiments, the alkylene is —CH₂CH₂CH₂—.

[0889] The term “alkenyl” refers to a type of alkyl group in which at least one carbon-carbon double bond is present. In one embodiment, an alkenyl group has the formula —C(R)═CR², wherein R refers to the remaining portions of the alkenyl group, which may be the same or different. In some embodiments, R is H or an alkyl. In some embodiments, an alkenyl is selected from ethenyl (i.e., vinyl), propenyl (i.e., allyl), butenyl, pentenyl, pentadienyl, and the like. Non-limiting examples of an alkenyl group include —CH═CH₂, —C(CH₃)═CH₂, —CH═CHCH₃, —C(CH₃)═CHCH₃, and —CH₂CH═CH₂.

[0890] The term “cycloalkyl” refers to a monocyclic or polycyclic non-aromatic radical, wherein each of the atoms forming the ring (i.e., skeletal atoms) is a carbon atom. In some embodiments, cycloalkyls are saturated or partially unsaturated. In some embodiments, cycloalkyls are spirocyclic or bridged compounds. In some embodiments, cycloalkyls are fused with an aromatic ring (in which case the cycloalkyl is bonded through a non-aromatic ring carbon atom). Cycloalkyl groups include groups having from 3 to 10 ring atoms. Representative cycloalkyls include, but are not limited to, cycloalkyls having from three to ten carbon atoms, from three to eight carbon atoms, from three to six carbon atoms, or from three to five carbon atoms. Monocyclic cycloalkyl radicals include, for example, cyclopropyl, cyclobutyl, cyclopentyl, cyclohexyl, cycloheptyl, and cyclooctyl. In some embodiments, the monocyclic cycloalkyl is cyclopropyl, cyclobutyl, cyclopentyl or cyclohexyl. In some embodiments, the monocyclic cycloalkyl is cyclopentenyl or cyclohexenyl. In some embodiments, the monocyclic cycloalkyl is cyclopenteny 1. Polycyclic radicals include, for example, adamantyl, 1,2-dihydronaphthalenyl, 1,4-dihydronaphthalenyl, tetrainyl, decalinyl, 3,4-dihydronaphthalenyl-. 1 (2H)-one. spiro[2.2] pentyl, norbomyl and bicycle [1.1.1]pentyl. Unless otherwise stated specifically in the specification, a cycloalkyl group may be optionally substituted. Depending on the structure, a cycloalkyl group can be monovalent or divalent (i.e., a cycloalkylene group).

[0891] The term “heterocycle” or “heterocyclic” refers to heteroaromatic rings (also known as heteroaryls) and heterocycloalkyls (also known as heteroalicyclic groups) that includes at least one heteroatom selected from nitrogen, oxygen, and sulfur, wherein each heterocyclic group has from 3 to 12 atoms in its ring system, and with the proviso that any ring does not contain two adjacent O or S atoms. A “heterocyclyl” is a univalent group formed by removing a hydrogen atom from any ring atoms of a heterocyclic compound. In some embodiments, heterocycles are monocyclic, bicyclic, polycyclic, spirocyclic or bridged compounds. Non-aromatic heterocyclic groups (also known as heterocycloalkyls) include rings having 3 to 12 atoms in its ring system and aromatic heterocyclic groups include rings having 5 to 12 atoms in its ring system. The heterocyclic groups include benzofused ring systems. Examples of non-aromatic heterocyclic groups are pyrrolidinyl, tetrahydrofuranyl, dihydrofuranyl, tetrahydrothienyl, oxazolidinonyl, tetrahydropyranyl, dihydropyranyl, tetrahydrothiopyranyl, piperidinyl, morpholinyl, thiomorpholinyl, thioxanyl, piperazinyl, aziridinyl, azetidinyl, oxetanyl, thietanyl, homopiperidinyl, oxepanyl, thiepanyl, oxazepinyl, diazepinyl, thiazepinyl, 1,2,3,6-tetrahydropyridinyl, pyrrolin-2-yl, pyrrolin-3-yl, indolinyl, 2H-pyranyl, 4Hpyranyl, dioxanyl, 1,3-dioxolanyl, pyrazolinyl, dithianyl, dithiolanyl, dihydropyranyl, dihydrothienyl, dihydrofuranyl, pyrazolidinyl, imidazolinyl, imidazoli diny I, 3-az.abicy cl o [3. 1.0]hexany 1,3-azabicyclo[4.1.0]heptanyl, 3 h-indolyl, indolin-2-onyl, isoindolin-1-onyl, isoindoline-1,3-dionyl, 3,4-dihydroisoquinolin-1 (2H)-onyl, 3,4-dihydroquinolin-2 (1H)-onyl, isoindoline-1,3-dithionyl, benzo[d] oxazol-2 (3H)-onyl, 1H-benzo[d] imidazol-2 (3H)-onyl, benzo[d] thiazol-2 (3H)-onyl, and quinolizinyl. Examples of aromatic heterocyclic groups are pyridinyl, imidazolyl, pyrimidinyl, pyrazolyl, triazolyl, pyrazinyl, tetrazolyl, futyl, thienyl, isoxazolyl, thiazolyl, oxazolyl, isothiazolyl, pyrrolyl, quinolinyl, isoquinolinyl, indolyl, benzimidazolyl, benzofuranyl, cinnolinyl, indazolyl, indolizinyl, phthalazinyl, pyridazinyl, triazinyl, isoindolyl, pteridinyl, purinyl, oxadiazolyl, thiadiazolyl, furaz.anyl, benzofuraz.anyl, benzothiophenyl, benzothiazolyl, benzoxazolyl, quinazolinyl, quinoxalinyl, naphthyridinyl, and furopyridinyl. The foregoing groups are either C-attached (or Clinked) or N-attached where such is possible. For instance, a group derived from pyrrole includes both pyrrol-1-yl (N-attached) or pyrrol-3-yl (C-attached). Further, a group derived from imidazole includes imidazol-1-yl or imidazol-3-yl (both N-attached) or imidazol-2-yl, imidazol-4-yl or imidazol-5-yl (all C-attached). The heterocyclic groups include benzo-fused ring systems. Non-aromatic heterocycles are optionally substituted with one or two oxo (═O) moieties, such as pyrrolidin-2-one. In some embodiments, at least one of the two rings of a bicyclic heterocycle is aromatic. In some embodiments, both rings of a bicyclic heterocycle are aromatic.

[0892] The term “heterocycloalkyl” refers to a cycloalkyl group that includes at least one heteroatom selected from nitrogen, oxygen, and sulfur. Unless stated otherwise specifically in the specification, the heterocycloalkyl radical may be a monocyclic, or bicyclic ring system, which may include fused (when fused with an aryl or a heterowyl ring, the heterocycloalkyl is bonded through a non-aromatic ring atom) or bridged ring systems. The nitrogen, carbon, or sulfur atoms in the heterocyclyl radical may be optionally oxidized. The nitrogen atom may be optionally quaternized. The heterocycloalkyl radical is partially or fully saturated. Examples of heterocycloalkyl radicals include, but are not limited to, dioxolanyl, thienyl[1,3]dithianyl, tetrahydroquinolyl, tetrahydroisoquinolyl, decahydroquinolyl, decahydroisoquinolyl, imidazolinyl, imidazolidinyl, isothiazolidinyl, isoxazolidinyl, morpholinyl, octahydroindolyl, octahydroisoindolyl, 2-oxopiperazinyl, 2-oxopiperidinyl, 2-oxopyrrolidinyl, oxazolidinyl, piperidinyl, piperazinyl, 4-piperidonyl, pyrrolidinyl, pyrazolidinyl, quinuclidinyl, thiazolidinyl, tetrahydrofuryl, trithianyl, tetrahydropyranyl, thiomorpholinyl, thiamorpholinyl, 1-oxothiomorpholinyl, 1,1-dioxo-thiomorpholinyl. The term heterocycloalkyl also includes all ring forms of carbohydrates, including but not limited to monosaccharides, disaccharides, and oligosaccharides. Unless otherwise noted, heterocycloalkyls have from 2 to 12 carbons in the ring. In some embodiments, heterocycloalkyls have from 2 to 10 carbons in the ring. In some embodiments, heterocycloalkyls have from 2 to 10 carbons in the ring and 1 or 2 N atoms. In some embodiments, heterocycloalkyls have from 2 to 10 carbons in the ring and 3 or 4 N atoms. In some embodiments, heterocycloalkyls have from 2 to 12 carbons, 0-2 N atoms, 0-2 O atoms, 0-2 P atoms, and 0-1 S atoms in the ring. In some embodiments, heterocycloalkyls have from 2 to 12 carbons, 1-3 N atoms, 0-1 O atoms, and 0-1 S atoms in the ring. It is understood that when referring to the number of carbon atoms in a heterocycloalkyl, the number of carbon atoms in the heterocycloalkyl is not the same as the total number of atoms (including the heteroatoms) that make up the heterocycloalkyl (i.e., skeletal atoms of the heterocycloalkyl ring). Unless stated otherwise specifically in the specification, a heterocycloalkyl group may be optionally substituted. As used herein, the term “teterocycloalkylene” can refer to a divalent heterocycloalkyl group.

[0893] The term “heteroaryl” refers to an aryl group that includes one or more ring heteroatoms selected from nitrogen, oxygen, and sulfur. The heteroaryl is monocyclic or bicyclic. Illustrative examples of monocyclic heteroaryls include pyridinyl, imidazolyl, pyrimidinyl, pyrazolyl, triazolyl, pyrazinyl, tetrazolyl, furyl, thienyl, isoxazolyl, thiazolyl, oxazolyl, isothiazolyl, pyrrolyl, pyridazinyl, triazinyl, oxadiazolyl, thiadiazolyl, furazanyl, indolizine, indole, benzofuran, benzothiophene, indazole, benzimidazole, purine, quinolizine, quinoline, isoquinoline, cinnoline, phthalazine, quinazoline, quinoxaline, 1,8-naphthyridine, and pteridine. Illustrative examples of monocyclic heteroaryls include pyridinyl, imidazolyl, pyrimidinyl, pyrazolyl, triazolyl, pyrazinyl, tetrazolyl, furyl, thienyl, isoxazolyl, thiazolyl, oxazolyl, isothiazolyl, pyrrolyl, pyridazinyl, triazinyl, oxadiazolyl, thiadiazolyl, and furazanyl. Illustrative examples of bicyclic heteroaryls include indolizine, indole, benzofuran, benzothiophene, indazole, benzimidazole, purine, quinolizine, quinoline, isoquinoline, cinnoline, phthalazine, quinazoline, quinoxaline, 1,8-naphthyridine, and pteridine. In some embodiments, heteroaryl is pyridinyl, pyrazinyl, pyrimidinyl, thiazolyl, thienyl, thiadiazolyl or furyl. In some embodiments, a heteroaryl contains 0-6 N atoms in the ring. In some embodiments, a heteroaryl contains 1˜4 N atoms in the ring. In some embodiments, a heteroaryl contains 4-6 N atoms in the ring. In some embodiments, a heteroaryl contains 0-4 N atoms, 0-1 O atoms, 0-1 P atoms, and 0-1 S atoms in the ring. In some embodiments, a heteroaryl contains 1˜4 N atoms, 0-1 O atoms, and 0-1 S atoms in the ring. In some embodiments, heteroaryl is a C₁-C₉ heteroaryl. In some embodiments, monocyclic heteroaryl is a C₁-C₅ heteroaryl. In some embodiments, monocyclic heteroaryl is a 5-membered or 6-membered heteroaryl. In some embodiments, a bicyclic heteroaryl is a C₆-C₉ heteroaryl. In some embodiments, a heteroaryl group is partially reduced to form a heterocycloalkyl group defined herein. In some embodiments, a heteroaryl group is fully reduced to form a heterocycloalkyl group defined herein.

[0894] The definitions of terms in the following twenty-five paragraphs apply only the compounds of Formula A′, III-a, and III-a-I, 1, VI, and VIA above

[0895] The term “aliphatic” or “aliphatic group”, as used herein, means a straight-chain (i.e., unbranched) or branched, substituted or unsubstituted hydrocarbon chain that is completely saturated or that contains one or more units of unsaturation, or a monocyclic hydrocarbon or bicyclic hydrocarbon that is completely saturated or that contains one or more units of unsaturation, but which is not aromatic (also referred to herein as “carbocycle,” “carbocyclic”, “cycloaliphatic” or “cycloalkyl”), that has a single point of attachment to the rest of the molecule. Unless otherwise specified, aliphatic groups contain 1-6 aliphatic carbon atoms. In some embodiments, aliphatic groups contain 1-5 carbon atoms. In some embodiments, aliphatic groups contain 1-4 carbon atoms. In some embodiments, aliphatic groups contain 1-3 carbon atoms, and in some embodiments, aliphatic groups contain 1-2 carbon atoms. In some embodiments, “carbocyclic” (or “cycloaliphatic” or “carbocycle” or “cycloalkyl”) refers to an optionally substituted monocyclic C₃-C₈ hydrocarbon, or an optionally substituted C₆-C₁₂ bicyclic hydrocarbon, that is completely saturated or that contains one or more units of unsaturation, but which is not aromatic, that has a single point of attachment to the rest of the molecule. Suitable aliphatic groups include, but are not limited to, linear or branched, substituted or unsubstituted alkyl, alkenyl, alkynyl groups and hybrids thereof such as (cycloalkyl)alkyl, (cycloalkenyl)alkyl or (cycloalkyl) alkenyl.

[0896] As used herein, the term “alkenyl” refers to an alkyl group, as defined herein, having one or more double bonds. In some embodiments, the term “alkenyl”, used alone or as part of a larger moiety, refers to an optionally substituted straight or branched hydrocarbon chain having at least one double bond and having (unless otherwise specified)₂-20, 2-18, 2-16, 2-14, 2-12, 2-10, 2-8, 2-6, 2-4, or 2-3 carbon atoms (e.g., C₂₋₂₀, C₂₋₁₈, C₂₋₁₆, C₂₋₁₄, C₂₋₁₂, C₂₋₁₀, C₂₋₈, C₂₋₆, C₂₋₄, or C₂₋₃). Exemplary alkenyl groups include ethenyl, propenyl, butenyl, pentenyl, hexenyl, and heptenyl.

[0897] The term “alkenylene” refers to a bivalent alkenyl group. A substituted alkenylene chain is a polymethylene group containing at least one double bond in which one or more hydrogen atoms are replaced with a substituent. Suitable substituents include those described below for a substituted aliphatic group.

[0898] As used herein, the term “alkyl” is given its ordinary meaning in the art and may include saturated aliphatic groups, including straight-chain alkyl groups, branched-chain alkyl groups, cycloalkyl (alicyclic) groups, alkyl substituted cycloalkyl groups, and cycloalkyl substituted alkyl groups. In some embodiments, alkyl has 1-100 carbon atoms. In certain embodiments, a straight chain or branched chain alkyl has about 1-20 carbon atoms in its backbone (e.g., C₁-C₂₀ for straight chain, C₂-C₂₀ for branched chain), and alternatively, about 1-10. In some embodiments, a cycloalkyl ring has from about 3-10 carbon atoms in their ring structure where such rings are monocyclic or bicyclic, and alternatively about 5, 6 or 7 carbons in the ring structure. In some embodiments, an alkyl group may be a lower alkyl group, wherein a lower alkyl group comprises 1˜4 carbon atoms (e.g., C₁-C₄ for straight chain lower alkyls).

[0899] The term “alkylenyl” or “alkylene” refers to a bivalent alkyl group (i.e., a bivalent saturated hydrocarbon chain) that is a straight-chain (i.e., unbranched) or branched, substituted or unsubstituted. Any of the above mentioned monovalent alkyl groups may be an alkylenyl by abstraction of a second hydrogen atom from the alkyl. In some embodiments, an “alkylenyl” is a polymethylene group, i.e., —(CH₂)ₙ—, wherein n is a positive integer, preferably from 1 to 10, from 1 to 9, from 1 to 8, from 1 to 7, from 1 to 6, from 1 to 5, from 1 to 4, from 1 to 3, from 1 to 2, from 2 to 5, or from 4 to 8. A substituted alkylenyl is a polymethylene group in which one or more methylene hydrogen atoms are replaced with a substituent. Suitable substituents include those described below for a substituted aliphatic group.

[0900] As used herein, the term “alkynyl” refers to an alkyl group, as defined herein, having one or more triple bonds. In some embodiments, the term “alkynyl”, used alone or as part of a larger moiety, refers to an optionally substituted straight or branched chain hydrocarbon group having at least one triple bond and having (unless otherwise specified)₂-20, 2-18, 2-16, 2-14, 2-12, 2-10, 2-8, 2-6, 2-4, or 2-3 carbon atoms (e.g., C₂₋₂₀, C₂₋₁₈, C₂₋₁₆, C₂₋₁₄, C₂₋₁₂, C₂₋₁₀, C₂₋₈, C₂₋₆, C₂₋₄, or C₂₋₃). Exemplary alkynyl groups include ethynyl, propynyl, butynyl, pentynyl, hexynyl, and heptynyl.

[0901] The term “aryl” refers to monocyclic and bicyclic ring systems having a total of six to fourteen ring members (e.g., C₆₋₁₄), wherein at least one ring in the system is aromatic and wherein each ring in the system contains three to seven ring members. The term “aryl” may be used interchangeably with the term “aryl ring”. In some embodiments, “aryl” refers to an aromatic ring system which includes, but is not limited to, phenyl, naphthyl, anthracyl and the like, which may bear one or more substituents. Unless otherwise specified, “aryl” groups are hydrocarbons.

[0902] As used herein, the term “bivalent” refers to a chemical moiety with two points of attachment. For example, a “bivalent C₁₋₈ (or C₁₋₆) saturated or unsaturated, straight or branched, hydrocarbon chain”, refers to bivalent alkylene, alkenylene, and alkynylene chains that are straight or branched as defined herein.

[0903] As used herein, the term “bridged bicyclic” refers to any bicyclic ring system, i.e. carbocyclic or heterocyclic, saturated or partially unsaturated, having at least one bridge. As defined by IUPAC, a “bridge” is an unbranched chain of atoms or an atom or a valence bond connecting two bridgeheads, where a “bridgehead” is any skeletal atom of the ring system which is bonded to three or more skeletal atoms (excluding hydrogen). In some embodiments, a bridged bicyclic group has 7-12 ring members and 0-4 heteroatoms independently selected from nitrogen, oxygen, or sulfur. Such bridged bicyclic groups are well known in the art and include those groups set forth below where each group is attached to the rest of the molecule at any substitutable carbon or nitrogen atom. Unless otherwise specified, a bridged bicyclic group is optionally substituted with one or more substituents as set forth for aliphatic groups. Additionally or alternatively, any substitutable nitrogen of a bridged bicyclic group is optionally substituted. Exemplary bridged bicyclics include but are not limited to:

[chemical structure]

[0904] The terms “carbocyclyl,” “carbocycle,” and “carbocyclic ring” as used herein, refer to saturated or partially unsaturated cyclic aliphatic monocyclic, bicyclic, or polycyclic ring systems, as described herein, having from 3 to 14 members, wherein the aliphatic ring system is optionally substituted as described herein. Carbocyclic groups include, without limitation, cyclopropyl, cyclobutyl, cyclopentyl, cyclopentenyl, cyclohexyl, cyclohexenyl, cycloheptyl, cycloheptenyl, cyclooctyl, cyclooctenyl, norbornyl, adamantyl, and cyclooctadienyl. In some embodiments, “carbocyclyl” (or “cycloaliphatic”) refers to an optionally substituted monocyclic C₃-C₈ hydrocarbon, or an optionally substituted C₆-C₁₂ bicyclic hydrocarbon that is completely saturated or that contains one or more units of unsaturation, but which is not aromatic, that has a single point of attachment to the rest of the molecule. The term “cycloalkyl” refers to an optionally substituted saturated ring system of about 3 to about 10 ring carbon atoms. In some embodiments, cycloalkyl groups have 3-6 carbons. Exemplary monocyclic cycloalkyl rings include cyclopropyl, cyclobutyl, cyclopentyl, cyclohexyl, and cycloheptyl. The term “cycloalkenyl” refers to an optionally substituted non-aromatic monocyclic or multicyclic ring system containing at least one carbon-carbon double bond and having about 3 to about 10 carbon atoms. Exemplary monocyclic cycloalkenyl rings include cyclopentenyl, cyclohexenyl, and cycloheptenyl.

[0905] The term “haloaliphatic” refers to an aliphatic group substituted by one or more halogen atoms (e.g., one, two, three, four, five, six, or seven halo, such as fluoro, iodo, bromo, or chloro). In some embodiments, haloaliphatic groups contain 1-7 halogen atoms. In some embodiments, haloaliphatic groups contain 1-5 halogen atoms. In some embodiments, haloaliphatic groups contain 1-3 halogen atoms.

[0906] The term “haloalkyl” refers to an alkyl group substituted by one or more halogen atoms (e.g., one, two, three, four, five, six, or seven halo, such as fluoro, iodo, bromo, or chloro). In some embodiments, haloalkyl groups contain 1-7 halogen atoms. In some embodiments, haloalkyl groups contain 1-5 halogen atoms. In some embodiments, haloalkyl groups contain 1-3 halogen atoms.

[0907] The term “heteroalkylenyl” or “heteroalkylene”, as used herein, denotes an optionally substituted straight-chain (i.e., unbranched), or branched bivalent alkyl group (i.e., bivalent saturated hydrocarbon chain) having, in addition to carbon atoms, from one to five heteroatoms. The term “heteroatom” is described below. In some embodiments, heteroalkylenyl groups contain 2-10 carbon atoms wherein 1-3 carbon atoms are optionally and independently replaced with heteroatoms selected from oxygen, nitrogen, and sulfur. In some embodiments, heteroalkylenyl groups contain 2-8 carbon atoms wherein 1-3 carbon atoms are optionally and independently replaced with heteroatoms selected from oxygen, nitrogen, and sulfur. In some embodiments, heteroalkylenyl groups contain 4-8 carbon atoms, wherein 1-3 carbon atoms are optionally and independently replaced with heteroatoms selected from oxygen, nitrogen, and sulfur. In some embodiments, heteroalkylenyl groups contain 2-5 carbon atoms, wherein 1-2 carbon atoms are optionally and independently replaced with heteroatoms selected from oxygen, nitrogen, and sulfur. In yet other embodiments, heteroalkylenyl groups contain 1-3 carbon atoms, wherein 1 carbon atom is optionally and independently replaced with a heteroatom selected from oxygen, nitrogen, and sulfur. Suitable heteroalkylenyl groups include, but are not limited to —CH₂O—, —(CH₂)₂O—, —CH₂OCH₂—, —O(CH₂)₂—, —(CH₂)₃O—, —(CH₂)₂OCH₂—, —CH₂O(CH₂)₂—, —O(CH₂)₃—, —(CH₂)₄O—, —(CH₂)₃OCH₂—, —CH₂O(CH₂)₃—, —(CH₂)₂O(CH₂)₂—, —O(CH₂)₄—. Unless otherwise specified, Cₓ heteroalkylenyl refers to heteroalkylenyl having x number of carbon atoms prior to replacement with heteroatoms.

[0908] The terms “heteroaryl” and “heteroar-”, used alone or as part of a larger moiety, e.g., “heteroaralkyl”, or “heteroaralkoxy”, refer to monocyclic or bicyclic ring groups having 5 to 10 ring atoms (e.g., 5- to 6-membered monocyclic heteroaryl or 9- to 10-membered bicyclic heteroaryl); having 6, 10, or 14 π electrons shared in a cyclic array; and having, in addition to carbon atoms, from one to five heteroatoms. Exemplary heteroaryl groups include, without limitation, thienyl, furanyl, pyrrolyl, imidazolyl, pyrazolyl, triazolyl, tetrazolyl, oxazolyl, isoxazolyl, oxadiazolyl, thiazolyl, isothiazolyl, thiadiazolyl, pyridyl, pyridonyl, pyridazinyl, pyrimidinyl, pyrazinyl, indolizinyl, purinyl, naphthyridinyl, pteridinyl, imidazo[1,2-a]pyrimidinyl, imidazo[1,2-a]pyridinyl, thienopyrimidinyl, triazolopyridinyl, and benzoisoxazolyl. The terms “heteroaryl” and “heteroar-”, as used herein, also include groups in which a heteroaromatic ring is fused to one or more aryl, cycloaliphatic, or heterocyclyl rings, where the radical or point of attachment is on the heteroaromatic ring (i.e., a bicyclic heteroaryl ring having 1 to 3 heteroatoms). Nonlimiting examples include indolyl, isoindolyl, benzothienyl, benzofuranyl, dibenzofuranyl, indazolyl, benzimidazolyl, benzothiazolyl, benzothiadiazolyl, benzoxazolyl, quinolyl, isoquinolyl, cinnolinyl, phthalazinyl, quinazolinyl, quinoxalinyl, 4H-quinolizinyl, carbazolyl, acridinyl, phenazinyl, phenothiazinyl, phenoxazinyl, tetrahydroquinolinyl, tetrahydroisoquinolinyl, pyrido[2,3-b]-1,4-oxazin-3 (4H)-one, and benzoisoxazolyl. The term “heteroaryl” may be used interchangeably with the terms “heteroaryl ring”, “heteroaryl group”, or “heteroaromatic”, any of which terms include rings that are optionally substituted.

[0909] The term “heteroatom” means one or more of oxygen, sulfur, nitrogen, phosphorus, or silicon (including, any oxidized form of nitrogen, sulfur, phosphorus, or silicon; the quaternized form of any basic nitrogen or; a substitutable nitrogen of a heterocyclic ring, for example N(as in 3,4-dihydro-2H-pyrrolyl), NH (as in pyrrolidinyl) or NR⁺ (as in N-substituted pyrrolidinyl)).

[0910] The terms “heterocycle”, “heterocyclyl”, “heterocyclic radical”, and “heterocyclic ring” are used interchangeably herein, and refer to a stable 3- to 8-membered monocyclic, a 7- to 12-membered bicyclic, or a 10- to 16-membered polycyclic heterocyclic moiety that is either saturated or partially unsaturated, and having, in addition to carbon atoms, one or more, such as one to four, heteroatoms, as defined above. When used in reference to a ring atom of a heterocycle, the term “nitrogen” includes a substituted nitrogen. As an example, in a saturated or partially unsaturated ring having 0-3 heteroatoms selected from oxygen, sulfur or nitrogen, the nitrogen may be N(as in 3,4-dihydro-2H-pyrrolyl), NH (as in pyrrolidinyl), or NR⁺ (as in N-substituted pyrrolidinyl). A heterocyclic ring can be attached to its pendant group at any heteroatom or carbon atom that results in a stable structure and any of the ring atoms can be optionally substituted. Examples of such saturated or partially unsaturated heterocyclic radicals include, without limitation, azetidinyl, oxetanyl, tetrahydrofuranyl, tetrahydrothienyl, pyrrolidinyl, piperidinyl, decahydroquinolinyl, oxazolidinyl, piperazinyl, tetrahydropyranyl, dioxanyl, dioxolanyl, diazepinyl, oxazepinyl, thiazepinyl, morpholinyl, thiamorpholinyl, and

[chemical structure]

A heterocyclyl group may be mono-, bi-, tri-, or polycyclic, preferably mono-, bi-, or tricyclic, more preferably mono- or bicyclic. The term “heterocyclylalkyl” refers to an alkyl group substituted by a heterocyclyl, wherein the alkyl and heterocyclyl portions independently are optionally substituted. A bicyclic heterocyclic ring also includes groups in which the heterocyclic ring is fused to one or more aryl, heteroaryl, or cycloaliphatic rings. Exemplary bicyclic heterocyclic groups include indolinyl, isoindolinyl, benzodioxolyl, 1,3-dihydroisobenzofuranyl, 2,3-dihydrobenzofuranyl, and tetrahydroquinolinyl. A bicyclic heterocyclic ring can also be a spirocyclic ring system (e.g., 7- to 11-membered spirocyclic fused heterocyclic ring having, in addition to carbon atoms, one or more heteroatoms as defined above (e.g., one, two, three or four heteroatoms)). A bicyclic heterocyclic ring can also be a bridged ring system (e.g., 7- to 11-membered bridged heterocyclic ring having one, two, or three bridging atoms.

[0911] As used herein, the term “linker” is used to refer to that portion of a multi-element agent that connects different elements to one another. For example, those of ordinary skill in the art appreciate that a polypeptide whose structure includes two or more functional or organizational domains often includes a stretch of amino acids between such domains that links them to one another. In some embodiments, a polypeptide comprising a linker element “L′” has an overall structure of the general form S1-L′-S2, wherein S1 and S2 may be the same or different and represent two domains associated with one another by the linker. In some embodiments, a polyptide linker is at least 2, 3, 4, 5, 6, 7, 8, 9, 10, 11, 12, 13, 14, 15, 16, 17, 18, 19, 20, 21, 22, 23, 24, 25, 26, 27, 28, 29, 30, 35, 40, 45, 50, 55, 60, 65, 70, 75, 80, 85, 90, 95, 100 or more amino acids in length. In some embodiments, a linker is characterized in that it tends not to adopt a rigid three-dimensional structure, but rather provides flexibility to the polypeptide. A variety of different linker elements that can appropriately be used when engineering polypeptides (e.g., fusion polypeptides) known in the art (see e.g., Holliger, P., et al. (1993) Proc. Natl. Acad. Sci. USA 90:6444-6448; Poljak, R. J., et al. (1994) Structure 2:1 121-1123).

[0912] The term “sterolyl,” as used herein, refers to a 17-membered fused polycyclic ring moiety that is either saturated or partially unsaturated and substituted with at least one hydroxyl group, and has a single point of attachment to the rest of the molecule at any substitutable carbon or oxygen atom. In some embodiments, a sterolyl group is a cholesterolyl group, or a variant or derivative thereof. In some embodiments, a cholesterolyl group is modified. In some embodiments, a cholesterolyl group is an oxidized cholesterolyl group (e.g., oxidized on the beta-ring structure or on the hydrocarbon tail structure). In some embodiments, a cholesterolyl group is an esterified cholesterolyl group. In some embodiments, a sterolyl group is a phytosterolyl group. Exemplary sterolyl groups include but are not limited to 25-hydroxycholesterolyl (25-OH), 20a-hydroxycholesterolyl (20a-OH), 27-hydroxycholesterolyl, 6-keto-5a-hydroxycholesterolyl, 7-ketocholesterolyl, 7ß-hydroxycholesterolyl, 7a-hydroxycholesterolyl, 7ß-25-dihydroxycholesterolyl, beta-sitosterolyl, stigmasterolyl, brassicasterolyl, and campesterolyl.

[0913] As described herein, compounds of this disclosure may be described as “substituted” or “optionally substituted”. That is, compounds may contain optionally substituted and/or substituted moieties. In general, the term “substituted,” whether preceded by the term “optionally” or not, means that one or more hydrogens of the designated moiety are replaced with a suitable substituent. “Substituted” applies to one or more hydrogens that are either explicit or implicit from the structure (e.g.,

[chemical structure]

refers to at least

[chemical structure]

refers to at least

[chemical structure]

Unless otherwise indicated, an “optionally substituted” group may have a suitable substituent at each substitutable position of the group, and when more than one position in any given structure may be substituted with more than one substituent selected from a specified group, the substituent may be either the same or different at every position. Combinations of substituents envisioned by this disclosure are preferably those that result in the formation of stable or chemically feasible compounds. The term “stable,” as used herein, refers to compounds that are not substantially altered when subjected to conditions to allow for their production, detection, and, in certain embodiments, their recovery, purification, and use for one or more of the purposes disclosed herein. Groups described as being “substituted” preferably have between 1 and 4 substituents, more preferably 1 or 2 substituents. Groups described as being “optionally substituted” may be unsubstituted or be “substituted” as described above.

[0914] Suitable monovalent substituents include halogen; —(CH₂)₀₋₄R^{o}; —(CH₂)₀₋₄OR^{o}; —O(CH₂)₀₋₄R^{o}, —O—(CH₂)₀₋₄C(O)OR^{o})₂; —(CH₂)₀₋₄CH(OR^{o})₂; —(CH₂)₀₋₄Ph, which may be substituted with R^{o}; —(CH₂)₀₋₄O(CH₂)₀₋₁Ph which may be substituted with R^{o}; —CH═CHPh, which may be substituted with R^{o}; —(CH₂)₀₋₄O(CH₂)₀₋₁-pyridyl which may be substituted with R^{o};—NO₂; —CN; —N₃; —(CH₂)₀₋₄N(R^{o})₂; —(CH₂)₀₋₄N(R^{o})C(O)R^{o}; —N(R^{o})C(S)R^{o}; —(CH₂)₀₋₄N(R^{o})C(O)NR°2; —N(R^{o})C(S)NR^{o})₂; —(CH₂)₀₋₄N(R^{o})C(O)OR^{o}; —N(R^{o}N(R^{o})C(O)R^{o}; —N(R^{o}N(R^{o})C(O)NR^{o})₂; —N(R^{o})N(R^{o}C(O)OR^{o}; —(CH₂)₀₋₄C(O)R^{o}; —C(S)R^{o}; —(CH₂)₀₋₄C(O)OR^{o}; —(CH₂)₀₋₄C(O)SR^{o}; —(CH₂)₀₋₄C(O)OSiR^{o}₃; —(CH₂)₀₋₄OC(O)R^{o}; —OC(O)(CH₂)₀₋₄SR^{o}—, —SC(S)SR^{o}; —(CH₂)₀₋₄SC(O)R^{o}; —(CH₂)₀₋₄C(O)NR^{o}₂; —C(S)NR^{o}₂; —C(S)SR^{o}; —SC(S)SR^{o}, —(CH₂)₀₋₄OC(O)NR^{o}₂; —C(O)N(OR^{o})R^{o}; —C(O)C(O)R^{o}; —C(O)CH₂C(O)R^{o}; —C(NOR^{o})R^{o}; —(CH₂)₀₋₄SSR^{o}; —(CH₂)₀₋₄S(O)₂R^{o}; —(CH₂)₀₋₄S(O)₂OR^{o}; —(CH₂)₀₋₄OS(O)₂R^{o}; —S(O)₂NR^{o}₂; —(CH₂)₀₋₄S(O)R^{o}; —N(R^{o})S(O)₂NR^{o}₂; —N(R^{o}S(O)₂R^{o}; —N(OR^{o})R^{o}; —C(NH)NR^{o}₂; —P(O)₂R^{o}; —P(O)R^{o}2; —OP(O)R^{o}2; —)OP(O) (OR^{o}2; —SiR^{o}3; —OSiR^{o}3; —(C₁-4 straight or branched alkylene)O—N(R^{o})₂; or —(C₁-4 straight or branched) alkylene)C(O)O—N(R^{o})₂, wherein each R^{o} may be substituted as defined below and is independently hydrogen, C₁₋₆ aliphatic, —CH₂Ph, —O (CH₂)₀₋₁Ph, —CH₂-(5-6 membered heteroaryl ring), or a 5-6-membered saturated, partially unsaturated, or aryl ring having 0-4 heteroatoms independently selected from nitrogen, oxygen, or sulfur, or, notwithstanding the definition above, two independent occurrences of R^{o}, taken together with their intervening atom(s), form a 3-12-membered saturated, partially unsaturated, or aryl mono- or bicyclic ring having 0-4 heteroatoms independently selected from nitrogen, oxygen, or sulfur, which may be substituted as defined below.

[0915] Suitable monovalent substituents on R^{o} (or the ring formed by taking two independent occurrences of R^{o} together with their intervening atoms), are independently halogen, —(CH₂)₀₋₂R^{•}, -(haloR^{•}, —(CH₂)₀₋₂OH, —(CH₂)₀₋₂OR^{•}, —(CH₂)₀₋₂CH (OR^{•})₂; —O(haloR^{•}), —CN, —N₃, —(CH₂)₀₋₂C(O)R^{•}, —(CH₂)₀₋₂C(O)OH, —(CH₂)₀₋₂C(O)OR^{•}, —(CH₂)₀₋₂C(O)NH₂, —(CH₂)₀₋₂C(O)NHR^{•}, —(CH₂)₀₋₂C(O)NR^{•}₂, —(CH₂)₀₋₂SR^{•}, —(CH₂)₀₋₂SH, —(CH₂)₀₋₂NH₂, —(CH₂)₀₋₂NHR^{•}, —(CH₂)₀₋₂NR^{•}₂, —NO₂, —SiR^{•}₃, —OSiR^{•}₃, —C(O)SR^{•}, —(C₁₋₄ straight or branched alkylene)C(O)OR^{o}, or —SSR^{•} wherein each R^{•} is unsubstituted or where preceded by “halo” is substituted only with one or more halogens, and is independently selected from C₁-4 aliphatic, —CH₂Ph, —O(CH₂)₀-1Ph, or a 5-6-membered saturated, partially unsaturated, or aryl ring having 0-4 heteroatoms independently selected from nitrogen, oxygen, or sulfur. Suitable divalent substituents on a saturated carbon atom of R^{o} include ═O and ═S.

[0916] Suitable divalent substituents include the following: ═O, ═S, ═NNR*2, ═NNHC(O)R*, ═NNHC(O)OR*,═NNHS(O)₂R*, —NR*, ═NOR*, —O(C(R*₂))₂₋₃O—, or —S(C(R*₂))₂₋₃S—, wherein each independent occurrence of R* is selected from hydrogen, C₁₋₆ aliphatic which may be substituted as defined below, or an unsubstituted 5-6-membered saturated, partially unsaturated, or aryl ring having 0-4 heteroatoms independently selected from nitrogen, oxygen, or sulfur. Suitable divalent substituents that are bound to vicinal substitutable carbons of an “optionally substituted” group include: —O(CR*₂)₂₋₃O—, wherein each independent occurrence of R* is selected from hydrogen, C₁₋₆ aliphatic which may be substituted as defined below, or an unsubstituted 5-6-membered saturated, partially unsaturated, or aryl ring having 0-4 heteroatoms independently selected from nitrogen, oxygen, or sulfur.

[0917] Suitable substituents on the aliphatic group of R*include halogen, —R⁵⁰⁰ , -(haloR^{•}), —OH, —OR^{•}, —O(haloR^{•}), —CN, —C(O)OH, —C(O)OR^{•}, —NH₂, —NHR^{•}, —NR^{•}₂, or —NO₂, wherein each R^{•} is unsubstituted or where preceded by “halo” is substituted only with one or more halogens, and is independently C₁₋₄ aliphatic, —CH₂Ph, —O(CH₂)₀₋₁Ph, or a 5-6-membered saturated, partially unsaturated, or aryl ring having 0-4 heteroatoms independently selected from nitrogen, oxygen, or sulfur.

[0918] In some embodiments, suitable substituents on a substitutable nitrogen include —R^{†}, —NR^{†}₂, —C(O)R^{†}, —C(O)OR^{†}, —C(O)C(O)R^{†}, —C(O)CH₂C(O)R^{\}, —S(O)₂R^{†}, —S(O)₂NR^{†}₂, —C(S)NR^{†}₂, —C(NH)NR^{†}₂, or —N(R^{†})S(O)₂R^{†}; wherein each R^{†} is independently hydrogen, C₁₋₆ aliphatic which may be substituted as defined below, unsubstituted —OPh, or an unsubstituted 5-6-membered saturated, partially unsaturated, or aryl ring having 0-4 heteroatoms independently selected from nitrogen, oxygen, or sulfur, or, notwithstanding the definition above, two independent occurrences of Rt, taken together with their intervening atom(s) form an unsubstituted 3-12-membered saturated, partially unsaturated, or aryl mono- or bicyclic ring having 0-4 heteroatoms independently selected from nitrogen, oxygen, or sulfur.

[0919] Suitable substituents on the aliphatic group of Rt are independently halogen, —R^{•}, -(haloR^{•}), —OH, —OR^{•}, —O (haloR^{•}), —CN, —C(O)OH, —C(O)OR^{•}, —NH₂, —NHR^{•}, —NR^{•}₂, or —NO₂, wherein each R^{•} is unsubstituted or where preceded by “halo” is substituted only with one or more halogens, and is independently C₁₋₄ aliphatic, —CH₂Ph, —O(CH₂)₀₋₁Ph, or a 5-6-membered saturated, partially unsaturated, or aryl ring having 0-4 heteroatoms independently selected from nitrogen, oxygen, or sulfur.

[0920] As used herein, amino lipids can contain at least one primary, secondary, or tertiary amine moiety that is protonatable (or ionizable) between pH range 4 and 14. In some embodiments, the amine moiety/moieties function as the hydrophilic headgroup of the amino lipids. When most of the amine moiety(ies) of an amino lipid (or amino lipids) in a nucleic acid-lipid nanoparticle formulation is protonated at physiological pH, then the nanoparticles can be termed as cationic lipid nanoparticle (cLNP). When most of the amine moiety(ies) of an amino lipid (or amino lipids) in a nucleic acid-lipid nanoparticle formulation is not protonated at physiological pH but can be protonated at acidic pH, endosomal pH for example, can be termed as ionizable lipid nanoparticle (iLNP). The amino lipids that constitute cLNPs can be generally called cationic amino lipids (cLi pids). The amino lipids that constitute iLNPs can be called ionizable amino lipids (iLipids). The amino lipid can be an iLipid or a cLipid at physiological pH.

[0921] As used herein, LNP compositions or formulations are typically sized on the order of micrometers or smaller and may include a lipid bilayer. Nanoparticle compositions encompass lipid nanoparticles (LNPs), liposomes lipid vesicles), and lipoplexesnanoparticle composition a liposome having a lipid bilayer with a diameter of 500 nm or less. The LNPs described herein can have a mean diameter of from about 1 nm to about 2500 nm, from about 10 nm to about 1500 nm, from about 20 nm to about 1000 nm, from about 30 nm to about 150 nm, from about 40 nm to about 150 nm, from about 50 nm to about 150 nm, from about 60 nm to about 130 nm, from about 70 nm to about 110 nm, from about 70 nm to about 100 nm, from about 80 nm to about 100 nm, from about 90 nm to about 100 nm, from about 70 to about 90 nm, from about 80 nm to about 90 nm or from about 70 nm to about 80 nm. The LNPs described herein can have a mean diameter of about 30 nm, 35 nm, 40 nm, 45 nm, 50 nm, 55 nm, 60 nm, 65 nm, 70 nm, 75 nm, 80 nm, 85 nm, 90 nm, 95 nm, 100 nm, 105 nm, 110 nm, 115 nm, 120 nm, 125 nm, 130 nm, 135 nm, 140 nm, 145 nm, 150 nm, or greater. The LNPs described herein can be substantially non-toxic.

[0922] As used herein, a “phospholipid” can refer to a lipid that includes a phosphate moiety and one or more carbon chains, such as unsaturated fatty acid chains. A phospholipid may include one or more multiple (e.g., double or triple) bonds. In some embodiments, a phospholipid may facilitate fusion to a membrane. For example, a cationic phospholipid may interact with one or more negatively charged phospholipids of a membrane (e.g., a cellular or intracellular membrane). Fusion of a phospholipid to a membrane may allow one or more elements of an LNP to pass through the membrane, i.e., delivery of the one or more elements to a cell.

### Payload

[0923] The LNPs described herein can be designed to deliver a payload, such as one or more therapeutic agent(s) or drug substances(s) to a target cell or organ of interest. In some embodiments, a LNP described herein encloses one or more components of a base editor system as described herein. For example, a LNP may enclose one or more of a guide RNA, a nucleic acid encoding the guide RNA, a vector encoding the guide RNA, a base editor fusion protein, a nucleic acid encoding the base editor fusion protein, a programmable DNA binding domain, a nucleic acid encoding the programmable DNA binding domain, a deaminase, a nucleic acid encoding the deaminase, or all or any combination thereof. In some embodiments, the nucleic acid is a DNA. In some embodiments, the nucleic acid is a RNA, for example, a mRNA and/or a guide RNA. In some embodiments, the said nucleic acid(s) is/are chemically modified.

[0924] In some embodiments, the payload comprises one or more nucleic acid(s) (i.e., one or more nucleic acid molecular entities). In some embodiments, the nucleic acid is a single-stranded nucleic acid. In some embodiments, single-stranded nucleic acid is a DNA. In some embodiments, single-stranded nucleic acid is an RNA. In some embodiments, the nucleic acid is a double-stranded nucleic acid. In some embodiments, the double-stranded nucleic acid is a DNA. In some embodiments, the double-stranded nucleic acid is an RNA. In some embodiments, the double-stranded nucleic acid is a DNA-RNA hybrid. In some embodiments, the nucleic acid is a messenger RNA (mRNA), a microRNA, an asymmetrical interfering RNA (aiRNA), a small hairpin RNA (shRNA), an antisense oligonucleotide, or a Dicer-Substrate dsRNA. In some embodiments, the single-stranded nucleic acids form secondary structure, one or more stem-loops for example. In some other embodiments, the single stranded nucleic acids contain one or more stem-loops and single-stranded regions within the molecule.

### Non-Viral Platforms for Gene Transfer

[0925] Non-viral platforms for introducing a heterologous polynucleotide into a cell of interest are known in the art.

[0926] For example, the disclosure provides a method of inserting a heterologous polynucleotide into the genome of a cell using a Cas9 or Cas12 (e.g., Cas12b) ribonucleoprotein complex (RNP)-DNA template complex where an RNP including a Cas9 or Cas12 nuclease domain and a guide RNA, wherein the guide RNA specifically hybridizes to a target region of the genome of the cell, and wherein the Cas nuclease domain cleaves the target region to create an insertion site in the genome of the cell. A DNA template is then used to introduce a heterologous polynucleotide. In embodiments, the DNA template is a double-stranded or single-stranded DNA template, wherein the size of the DNA template is about 200 nucleotides or is greater than about 200 nucleotides, wherein the 5′ and 3′ ends of the DNA template comprise nucleotide sequences that are homologous to genomic sequences flanking the insertion site. In some embodiments, the DNA template is a single-stranded circular DNA template. In embodiments, the molar ratio of RNP to DNA template in the complex is from about 3:1 to about 100:1.

[0927] In some embodiments, the DNA template is a linear DNA template. In some examples, the DNA template is a single-stranded DNA template. In certain embodiments, the single-stranded DNA template is a pure single-stranded DNA template. In some embodiments, the single stranded DNA template is a single-stranded oligodeoxynucleotide (ssODN).

[0928] In other embodiments, a single-stranded DNA (ssDNA) can produce efficient homology-directed repair (HDR) with minimal off-target integration. In one embodiment, an ssDNA phage is used to efficiently and inexpensively produce long circular ssDNA (cssDNA) donors. These cssDNA donors serve as efficient HDR templates when used with Cas9 or Cas12 (e.g., Cas12a, Cas12b), with integration frequencies superior to linear ssDNA (IssDNA) donors.

[0929] In some embodiments, a heterologous polynucleotide may be inserted into the genome of a cell using a transposable element such as a transposon, as described, for example, in Tipanee, et al. Human Gene Therapy, November 2017, 1087-1104, DOI: 10.1089/hum.2017.128. Transposable elements are divided into two categories: retrotransposons and DNA transposons. Transposable elements can alter the genome of the host cells through insertions, duplications, deletions, and translocations. Retrotransposons are described as mobile elements that employ an RNA intermediate that is first reverse transcribed into a complementary single-stranded (c) DNA strand by a reverse transcriptase encoded by the retrotransposon. Subsequently, the single-stranded DNA is converted into a double-stranded DNA that then integrates into the host genome. This so-called “replicative mechanism” yields several new copies of retrotransposons expanding throughout the target genome over evolutionary time. Retrotransposons are categorized into many subtypes according to the DNA sequences of the long terminal repeats and its open reading frames. Retrotransposons were employed to enable transgene integration into the target cell DNA, in some cases relying on adenoviral delivery. Alternatively, DNA transposons translocate via a “non-replicative mechanism,” whereby two Terminal Inverted Repeats (TIRs) are recognized and cleaved by a transposase enzyme, releasing the cognate DNA transposons with free DNA ends. The excised DNA transposons then integrate into a new genomic region where target sites are recognized and cut by the same transposase. This cut-and-paste mechanism usually duplicates DNA target sites upon insertion, leaving target site duplications (TSDs). Non-limiting examples of transposons include the Sleeping Beauty (SB) transposon, the piggyBac (PB) transposon, and Tol2 transposable elements.

### Pharmaceutical Compositions

[0930] In some aspects, the present disclosure provides a pharmaceutical composition comprising any of the cells, polynucleotides, vectors, base editors, base editor systems, guide polynucleotides, fusion proteins, complexes, or the fusion protein-guide polynucleotide complexes described herein.

[0931] The pharmaceutical compositions of the present disclosure can be prepared in accordance with known techniques. See, e.g., Remington, The Science And Practice of Pharmacy (21st ed. 2005). In general, the cell, or population thereof is admixed with a suitable carrier prior to administration or storage, and in some embodiments, the pharmaceutical composition further comprises a pharmaceutically acceptable carrier. Suitable pharmaceutically acceptable carriers generally comprise inert substances that aid in administering the pharmaceutical composition to a subject, aid in processing the pharmaceutical compositions into deliverable preparations, or aid in storing the pharmaceutical composition prior to administration. Pharmaceutically acceptable carriers can include agents that can stabilize, optimize or otherwise alter the form, consistency, viscosity, pH, pharmacokinetics, solubility of the formulation. Such agents include buffering agents, wetting agents, emulsifying agents, diluents, encapsulating agents, and skin penetration enhancers. For example, carriers can include, but are not limited to, saline, buffered saline, dextrose, arginine, sucrose, water, glycerol, ethanol, sorbitol, dextran, sodium carboxymethyl cellulose, and combinations thereof.

[0932] In some embodiments, the pharmaceutical composition is formulated for delivery to a subject. Suitable routes of administrating the pharmaceutical composition described herein include, without limitation: topical, subcutaneous, transdermal, intradermal, intralesional, intraarticular, intraperitoneal, intravesical, transmucosal, gingival, intradental, intracochlear, transtympanic, intraorgan, epidural, intrathecal, intramuscular, intravenous, intravascular, intraosseus, periocular, intratumoral, intracerebral, and intracerebroventricular administration.

[0933] In some embodiments, the pharmaceutical composition described herein is administered locally to a diseased site (e.g., a liver). In some embodiments, the pharmaceutical composition described herein is administered to a subject by injection, by means of a catheter, by means of a suppository, or by means of an implant, the implant being of a porous, non-porous, or gelatinous material, including a membrane, such as a sialastic membrane, or a fiber.

[0934] In some embodiments, any of the fusion proteins, gRNAs, and/or complexes described herein are provided as part of a pharmaceutical composition. In some embodiments, the pharmaceutical composition comprises any of the fusion proteins or complexes provided herein. In some embodiments pharmaceutical composition comprises a gRNA, a nucleic acid programmable DNA binding protein, a cationic lipid, and a pharmaceutically acceptable excipient. In embodiments, pharmaceutical compositions comprise a lipid nanoparticle and a pharmaceutically acceptable excipient. In embodiments, the lipid nanoparticle contains a gRNA, a base editor, a complex, a base editor system, or a component thereof of the present disclosure, and/or one or more polynucleotides encoding the same. Pharmaceutical compositions can optionally comprise one or more additional therapeutically active substances.

[0935] The compositions, as described above, can be administered in effective amounts. The effective amount will depend upon the mode of administration, the particular condition being treated, and the desired outcome. It may also depend upon the stage of the condition, the age and physical condition of the subject, the nature of concurrent therapy, if any, and like factors well-known to the medical practitioner. For therapeutic applications, it is that amount sufficient to achieve a medically desirable result.

[0936] In some embodiments, compositions in accordance with the present disclosure can be used for treatment of any of a variety of diseases, disorders, and/or conditions.

### Methods of Treatment

[0937] Some aspects of the present invention provide methods of treating a subject having or having a propensity to develop amyloidosis, the method comprising administering to a subject in need an effective therapeutic amount of a pharmaceutical composition as described herein. In some embodiments, the methods of the invention comprise expressing or introducing into a cell of a subject a base editor polypeptide and one or more guide RNAs capable of targeting a nucleic acid molecule encoding a transthyretin polypeptide comprising a pathogenic mutation.

[0938] One of ordinary skill in the art would recognize that multiple administrations of the pharmaceutical compositions contemplated in particular embodiments may be required to affect the desired therapy. For example, a composition may be administered to the subject 1, 2, 3, 4, 5, 6, 7, 8, 9, or 10 or more times over a span of 1 week, 2 weeks, 3 weeks, 1 month, 2 months, 3 months, 4 months, 5 months, 6 months, 1 year, 2 years, 5, years, 10 years, or more.

[0939] In any of such methods, the methods may comprise administering to the subject an effective amount of an edited cell or a base editor system or polynucleotide encoding such system. In any of such methods, the methods may comprise administering one or more doses of an effective amount of the edited cells per day. In any of such methods, the methods may comprise administering two or more doses of an effective amount of the mod edited ified cells per day. In any of such methods, the methods may comprise administering three or more doses of an effective amount of the edited cells per day. In any of such methods, the methods may comprise administering one or more doses of an effective amount of the edited cells per week. In any of such methods, the methods may comprise administering two or more doses of an effective amount of the edited cells per week. In any of such methods, the methods may comprise administering three or more doses of an effective amount of the edited cells per week. In any of such methods, the methods may comprise administering one or more doses of an effective amount of the edited cells per month. In any of such methods, the methods may comprise administering two or more doses of an effective amount of the edited cells per month. In any of such methods, the methods may comprise administering three or more doses of an effective amount of the edited cells per month.

[0940] Administration of the pharmaceutical compositions contemplated herein may be carried out using conventional techniques including, but not limited to, infusion, transfusion, or parenterally. In some embodiments, parenteral administration includes infusing or injecting intravascularly, intravenously, intramuscularly, intraarterially, intrathecally, intratumorally, intradermally, intraperitoneally, transtracheally, subcutaneously, subcuticularly, intraarticularly, subcapsularly, subarachnoidly and intrasternally.

[0941] In some embodiments, the composition is administered over a period of 0.25 h, 0.5 h, 1 h, 2 h, 3 h, 4 h, 5 h, 6 h, 7 h, 8 h, 9 h, 10 h, 11 h, or 12 h. In another embodiment, the composition is administered over a period of 0.25-2 h. In another embodiment, the composition is gradually administered over a period of 1 h. In another embodiment, the composition is gradually administered over a period of 2 h.

### Kits

[0942] The disclosure provides kits for the treatment of amyloidosis in a subject. In some embodiments, the kit further includes a base editor system or a polynucleotide encoding a base editor system, wherein the base editor polypeptide system a nucleic acid programmable DNA binding protein (napDNAbp), a deaminase, and a guide RNA. In some embodiments, the napDNAbp is Cas9 or Cas12. In some embodiments, the polynucleotide encoding the base editor is a mRNA sequence. In some embodiments, the deaminase is a cytidine deaminase or an adenosine deaminase. In some embodiments, the kit comprises an edited cell and instructions regarding the use of such cell.

[0943] The kits may further comprise written instructions for using the base editor system and/or edited cell. In other embodiments, the instructions include at least one of the following: precautions; warnings; clinical studies; and/or references. The instructions may be printed directly on the container (when present), or as a label applied to the container, or as a separate sheet, pamphlet, card, or folder supplied in or with the container. In a further embodiment, a kit can comprise instructions in the form of a label or separate insert (package insert) for suitable operational parameters. In yet another embodiment, the kit can comprise one or more containers with appropriate positive and negative controls or control samples, to be used as standard(s) for detection, calibration, or normalization. The kit can further comprise a second container comprising a pharmaceutically-acceptable buffer, such as (sterile) phosphate-buffered saline, Ringer's solution, or dextrose solution. It can further include other materials desirable from a commercial and user standpoint, including other buffers, diluents, filters, needles, syringes, and package inserts with instructions for use.

[0944] The practice of embodiments of the present disclosure employs, unless otherwise indicated, conventional techniques of molecular biology (including recombinant techniques), microbiology, cell biology, biochemistry and immunology, which are well within the purview of the skilled artisan. Such techniques are explained fully in the literature, such as, “Molecular Cloning: A Laboratory Manual”, second edition (Sambrook, 1989); “Oligonucleotide Synthesis” (Gait, 1984); “Animal Cell Culture” (Freshney, 1987); “Methods in Enzymology” “Handbook of Experimental Immunology” (Weir, 1996); “Gene Transfer Vectors for Mammalian Cells” (Miller and Calos, 1987); “Current Protocols in Molecular Biology” (Ausubel, 1987); “PCR: The Polymerase Chain Reaction”, (Mullis, 1994); “Current Protocols in Immunology” (Coligan, 1991). These techniques are applicable to the production of the polynucleotides and polypeptides of the disclosure, and, as such, may be considered in making and practicing embodiments of the disclosure. Particularly useful techniques for particular embodiments will be discussed in the sections that follow.

[0945] The following examples are put forth so as to provide those of ordinary skill in the art with a complete disclosure and description of how to make and use the assay, screening, and therapeutic methods of the disclosure, and are not intended to limit the scope of what the inventors regard as their invention.

### EXAMPLE

### Example 1: Guides for Adenine Base Editing of the TTR Gene

[0946] In this example, gRNA sequences were identified that permit ABE8.8 (and other ABE variants containing Streptococcus pyogenes Cas9, such as ABE7.10, or another Cas protein that can use the NGG PAM) to either: 1) disrupt the start codon, and/or 2) disrupt splice sites, whether donors or acceptors, via A→G editing within its editing window (roughly positions 4 to 7 in the 20-nt protospacer region of DNA). Five sequences were identified throughout the human TTR gene that disrupt TTR expression (Table 8). gRNAs were synthesized matching each of the protospacer sequences and otherwise conforming to the standard 100-nt Streptococcus pyogenes CRISPR gRNA sequence, with each gRNA molecule having a minimal degree of chemical modifications (specified in Table 8). Each of the gRNAs was co-transfected with an equivalent amount of in vitro transcribed ABE8.8 mRNA (1:1 ratio by molecular weight) into primary human hepatocytes via MessengerMax reagent (Lipofectamine), using various dilutions (2500,1250, 625 ng/RNA/mL) to assess for editing activity at different concentrations of test article.

TABLE 8
TTR Guides

| gRNA | | Protospacer | |
|---|---|---|---|
| ID | Species | (5′-3′) | gRNA sequence (5′-3′) (spacers are in bold) |
| GA457 | Human | GCCATCCT | gscscsAUCCUGCCAAGAAUGAGGUUUUAGAGCUAGA |
| | | GCCAAGAA | AAUAGCAAGUUAAAAUAAGGCUAGUCCGUUAUCAACU |
| | | TGAG (SEQ | UGAAAAAGUGGCACCGAGUCGGUGCUsususu (SEQ |
| | | ID NO: 467) | ID NO: 479) |
| GA519 | Cyno | GCCATCCT | gscscsAUCCUGCCAAGAACGAGgUUUUAGagcuaGa |
| | | GCCAAGAA | aauagcaaGUUaAaAuAaggcuaGUccGUUAucAAcu |
| | | CGAG (SEQ | uGaaaaagugGcaccgagucggugcuususus (SEQ |
| | | ID NO: 471) | ID NO: 1044) |
| GA458 | Cyno | GCCATCCT | gscscsAUCCUGCCAAGAACGAGGUUUUAGAGCUAGA |
| | | GCCAAGAA | AAUAGCAAGUUAAAAUAAGGCUAGUCCGUUAUCAACU |
| | | CGAG (SEQ | UGAAAAAGUGGCACCGAGUCGGUGCUsususu (SEQ |
| | | ID NO: 471) | ID NO: 1045) |
| GA459 | Human | GCAACTTA | gscsasACUUACCCAGAGGCAAAGUUUUAGAGCUAGA |
| | | CCCAGAGG | AAUAGCAAGUUAAAAUAAGGCUAGUCCGUUAUCAACU |
| | | CAAA (SEQ | UGAAAAAGUGGCACCGAGUCGGUGCUsususu (SEQ |
| | | ID NO: 468) | ID NO: 499) |
| GA460 | Human/ | TATAGGAA | usasusAGGAAAACCAGUGAGUCGUUUUAGAGCUAGA |
| | Cyno | AACCAGTG | AAUAGCAAGUUAAAAUAAGGCUAGUCCGUUAUCAACU |
| | | AGTC (SEQ | UGAAAAAGUGGCACCGAGUCGGUGCUsususu (SEQ |
| | | ID NO: 469) | ID NO: 497) |
| GA520 | Human/ | TATAGGAA | usasusAGGAAAACCAGUGAGUCgUUUUAGagcuaGa |
| | Cyno | AACCAGTG | aauagcaaGUUaAaAuAaggcuaGUccGUUAucAAcu |
| | | AGTC (SEQ | uGaaaaagugGcaccgagucggugcuususus (SEQ |
| | | ID NO: 469) | ID NO: 497) |
| GA461 | Human/ | TACTCACC | usascsUCACCUCUGCAUGCUCAGUUUUAGAGCUAGA |
| | Cyno | TCTGCATG | AAUAGCAAGUUAAAAUAAGGCUAGUCCGUUAUCAACU |
| | | CTCA (SEQ | UGAAAAAGUGGCACCGAGUCGGUGCUsususu (SEQ |
| | | ID NO: 470) | ID NO: 480) |
| GA521 | Human | GCCATCCT | mG*mC*mC*ATCCTGCCAAGAATGAGmGUUUUAGmAm |
| | | GCCAAGAA | GmCmUmAGmAmAmAmUmAmGmCmAmAGUUmAAmAAmU |
| | | TGAG (SEQ | AmAmGmGmCmUmAGUmCmCGUUAmUmCAAmCmUmUGm |
| | | ID NO: 467) | AmAmAmAmAmGmUmGGmCmAmCmCmGmAmGmUmCmGm |
| | | | GmUmGmCmU*mU*mU*mU (SEQ ID NO: 1045) |

Letters in the sequences:- A: adenosine; C: cytidine; G: guanosine; U: uridine; a or mA: 2′-O-methyladenosine; c or mC: 2′-O-methylcytidine; g or mG: 2′-O-methylguanosine; u or mU: 2′-O-methyluridine; and s or *: phosphorothioate (PS) backbone linkage. Bold type in gRNA sequence denotes spacer sequence corresponding to Protospacer. GA460 and GA520 have the same protospacer sequence but have different chemical modifications in the gRNA sequence.

[0947] For orthogonal protospacer sequences of the corresponding cynomolgus monkey TTR gene sequence, each gRNA was also transfected with an equivalent amount of ABE8.8 mRNA (1:1 ratio by molecular weight) into primary cynomolgus hepatocytes at 5000, 2500, 1250, 625, 312.5, and 156.25 ng/RNA/mL. The mRNA, and corresponding amino acid, sequence of the ABE8.8 (MA004) used in shown below in Table 18. Three days after transfection, genomic DNA was harvested from the hepatocytes, and assessed for base editing with next-generation sequencing of PCR amplicons generated around the target splice site. Several sites exhibited high editing efficiency. In particular, GA457 (GA458 is the cynomolgus equivalent), GA460, and GA461 showed high editing activity in both human and cynomolgus primary hepatocytes. See FIGS. 5A-5C, FIG. 6, and Tables 9-10.

TABLE 9
Editing activity in human primary hepatocytes

| | | Human hepatocytes- Editing % | | | | | |
|---|---|---|---|---|---|---|---|
| | | 2500, | 2500, | 1250, | 1250, | 625, | 625, |
| gRNA ID | Protospacer (5′-3′) | rep 1 | rep 2 | rep 1 | rep 2 | rep 1 | rep 2 |
| GA457 | GCCATCCTGCCAAGA | 33.96 | 31.31 | 26.49 | 24.86 | 17.24 | 15.39 |
| | ATGAG (SEQ ID NO: | | | | | | |
| | 467) | | | | | | |
| | GCAACTTACCCAGAG | | | | | | |
| GA459 | GCAAA (SEQ ID NO: | 8.5 | 8.69 | 5.46 | 6.15 | 3.79 | 3.89 |
| | 468) | | | | | | |
| | TATAGGAAAACCAGT | | | | | | |
| GA460 | GAGTC (SEQ ID NO: | 47.61 | 47.79 | 38.33 | 35.8 | 23.77 | 22.27 |
| | 469) | | | | | | |
| | TACTCACCTCTGCAT | | | | | | |
| GA461 | GCTCA (SEQ ID NO: | 40.42 | 39.43 | 32.82 | 32.38 | 21.81 | 22.31 |
| | 470) | | | | | | |

TABLE 10
Editing activity in cyno primary hepatocytes

| | | Cyno hepatocytes- Editing % | | | | | |
|---|---|---|---|---|---|---|---|
| gRNA ID | Protospacer (5′-3′) | 5000 | 2500 | 1250 | 625 | 312.5 | 156.25 |
| GA458 | GCCATCCTGCCAAGAACGAG | 35.91 | 27.25 | 22.74 | 16.07 | 10.65 | 6.06 |
| | (SEQ ID NO: 471) | | | | | | |
| GA460 | TATAGGAAAACCAGTGAGTC | 40.16 | 38.25 | 31.71 | 18.44 | 11.22 | 1.62 |
| | (SEQ ID NO: 469) | | | | | | |
| GA461 | TACTCACCTCTGCATGCTCA | 37.53 | 29.8 | 19.46 | 13.16 | 7.45 | 0.07 |
| | (SEQ ID NO: 470) | | | | | | |

[0948] Results presented in Tables 9 and 10 are to be understood to be representative of results that may be achieved in accordance with the teachings provided herein. Compositions for editing a TTR gene according to the invention may produce editing activity that varies from the activity set forth in Table 9 or Table 10 by 10% or more, 20% or more, 30% or more, 40% or more, 50% or more, 60% or more, 70% or more, 80% or more, 90% or more, or 100% or more. In some embodiments, the compositions provide editing activity that is within 100%, within 90%, within 80%, with 70%, within 60%, within 50%, within 40%, within 30% or more, within 20% or more, or within 10% of the activity as set forth in Table 9 or Table 10.

### Example 2: Off Target Analysis

[0949] With a view towards establishing the safety of a base-editing therapy knocking down of TTR in the human liver in vivo, off-target mutagenesis analysis is assessed in primary human hepatocytes. Following the ONE-seq procedures detailed in PCT/US19/27788 (“Highly Sensitive in vitro Assays to Define Substrate Preferences and Sites of Nucleic-Acid Binding, Modifying, and Cleaving Agents”), off-target editing in human hepatocytes was assessed. A simplified flowchart of off-target analysis with the ONE-seq procedure is shown in FIG. 7. The in vitro biochemical assay ONE-seq was used to generate a list of candidate off-target sites and to determine the propensity of a ribonucleoprotein comprising the ABE8.8 base editor protein and each of the three protospacer guides sequences (GA457, GA460, and GA461) to cleave oligonucleotides in a library. The results from ONE-seq analysis of libraries generated for GA457, GA460, and GA461 are shown in Tables 15-17, with candidate off-target sites listed.

[0950] The methodology for ONE-seq is as follows: the design of a ONE-seq library starts with the computational identification of sites in a reference genome that have sequence homology to the on-target. For human ONE-seq libraries, the reference human genome (GRCh38, Ensembl v98, chromosomes ftp://ftp.ensembl.org/pub/release-98/fasta/homo_sapiens/dna/Homo_sapiens.GRCh38.dna.chromosome. {1-22,X,Y,MT}.fa and ftp://ftp.ensembl.org/pub/release-98/fasta/homo_sapiens/dna/Homo_sapiens.GRCh38.dna.nonchromosomal.fa), was searched for potential off-target sites with up to 6 mismatches to the protospacer sequence above, and sites with up to 4 mismatches plus up to 2 DNA or RNA bulges, using Cas-Designer v1.2 (rgenome.net/cas-designer/).

[0951] Sites with up to 6 mismatches and no bulges are referred to using a X<number of mismatches><number of bulges >code. As such, the on-target site is labelled as X⁰⁰; a site with 1 mismatch to the on-target and no bulges is labelled as X¹⁰, and so on. Sites with DNA bulges are referred to with a similar nomenclature, DNA<number of mismatches><number of bulges>. As such, a site with 4 mismatches to the on-target and 2 DNA bulges is labelled as DNA42. The same nomenclature is used for RNA bulges, but these are coded as RNA<number of mismatches><number of bulges>.

[0952] The protospacer sequences identified were extended by 10 nucleotides (nt) on both sides with adjacent sequence from the respective reference genome (these regions are herein referred to as the genomic context). These extended sequences were then padded by additional sequences up to a final length of approximately 200 nt, including 6 predefined constant regions of different nucleotide composition and sequence length; 2 copies of a 14-nt site-specific barcode, one on each side of the central protospacer sequence; and 2 distinct 11-nt unique molecular identifiers (UMIs), one on each side of the central protospacer sequence. The UMIs are used to correct for bias from PCR amplification, and the barcodes allow for the unambiguous identification of each site during analysis. The barcodes are selected from an initial list of 668,420 barcodes, which contain neither a CC nor a GG in their sequences, and each barcode has a Hamming distance of 2 from any other barcode. A custom Python script was used for designing the final library.

[0953] The final oligonucleotide libraries are synthesized by a commercial vendor (Agilent Technologies). Each library is PCR-amplified and subjected to 1.25x AMPure XP bead purification (Beckman Coulter). After incubation at 25° C. for 10 minutes in CutSmart buffer (New England Biolabs), RNP comprising 769 nM recombinant ABE8.8-m protein and 1.54 uM gRNA is mixed with 100 ng of the purified library and incubated at 37° C. for 8 hours. The RNP dose is derived from an analysis documenting that it is a super-saturating dose, ie, above the dose that achieves the maximum amount of on-target editing in the biochemical assay.

[0954] Proteinase K (New England Biolabs) is added to quench the reaction at 37° C. for 45 minutes, followed by 2x AMPure XP bead purification. The reaction is then serially incubated with EndoV (New England Biolabs) at 37° C. for 30 minutes, Klenow Fragment (New England Biolabs) at 37° C. for 30 minutes, and NEBNext Ultra II End Prep Enzyme Mix (New England Biolabs) at 20° C. for 30 minutes followed by 65° C. for 30 minutes, with 2x AMPure XP bead purification after each incubation. The reaction is ligated with an annealed adaptor oligonucleotide duplex at 20° C. for 1 hour to facilitate PCR amplification of the cleaved library products, followed by 2x AMPure XP bead purification. Size selection of the ligated reaction is performed on a PippinHT system (Sage Sciences) to isolate DNA of 150 to 200 bp on a 3% agarose gel cassette, followed by 2 rounds of PCR amplification to generate a barcoded library, which undergoes paired-end sequencing on an Illumina MiSeq System as described above.

[0955] Two cleavage products are obtained in a ONE-seq experiment. The PROTO side includes the part of the oligonucleotide upstream of the cleavage position, whereas the PAM side includes part of the oligonucleotide downstream of the cleavage position. In an ABE experiment, only the PROTO side is informative of editing activity (an A→G substitution); therefore, only this side is sequenced.

[0956] Paired-end reads were trimmed for sequencing adapters using trimmomatic v0.39 (Bolger et al., 2014) with custom Nextera adapters (PrefixPE/1: 5′-ACACTCTTTCCCTACACGACGCTCTTCCGATCT-3′ (SEQ ID NO: 1046); PrefixPE/2: 5′-GTGACTGGAGTTCAGACGTGTGCTCTTCCGATCT-3′ (SEQ ID NO: 1047); as specified in file) and parameters “ILLUMINACLIP: NEB custom.fa: 2:30:10:1: true LEADING: 0 TRAILING: 0 SLIDINGWINDOW: 4:30 MINLEN: 36”. For experiments with lower sequencing quality (VOL014), these parameters were set to “ILLUMINACLIP NEB custom.fa: 2:30:10:1: true LEADING: 2 TRAILING: 0 SLIDINGWINDOW: 30:30 MINLEN: 36”. Reads were then merged using FLASH v1.2.11 (Magoc and Salzberg, 2011) with parameters “--max-mismatch-density-0.25--max-overlap=160”. Merged reads were scanned for the constant sequences, barcodes and protospacer sequences unique to each site, and filtered to those with evidence of an A→G substitution in the editing window (defined as the 1-10 most PAM-distal positions of the protospacer). Duplicated reads were discarded.

[0957] For each site, the total number of edited reads was normalized to the total number of edited reads assigned to the on-target site, and this ratio defines the ONE-seq score for the site. Sites were ranked by ONE-seq score, and those with a score equal to or larger than 0.001, were selected for validation. A score equal to or larger than 0.001 encompasses sites that have down to 1000-fold less editing activity in the biochemical assay compared to editing of the on-target site. This threshold is based on the premise that in cells, if there is 100% on-target editing, 1/1000-fold less editing activity would translate to <0.1% off-target editing, which falls below the lower limit of detection of editing by NGS. Oligonucleotides with higher sequence counts reflect a higher propensity for Cas9/gRNA cleavage in vitro and hence for greater potential of off-target mutagenesis in cells.

[0958] Several candidate off-target sites were analyzed for off-target editing in human primary hepatocytes. Table 11 shows the results from validating 47 candidate off-target sites for guide RNA GA457, from cells co-transfected with gRNA and an equivalent amount of in vitro transcribed ABE8.8 mRNA (1:1 ratio by molecular weight) into primary human hepatocytes via MessengerMax reagent (Lipofectamine). The on-target site has high editing efficiency, while all off-target sites show little to no editing (less than 0.4% net editing).

TABLE 11
GA457 validation against 47 potential off-target candidate
sites in human primary hepatocytes

| | | SEQ | % Editing- human primary | | |
|---|---|---|---|---|---|
| GA457 | | ID | hepatocytes | | |
| ID | Sequence (5′-3′) | NO: | Treated | Untreated | Net |
| OT1 | GCCATCCTACCAGGAATGAA | 1048 | 0.28 | 0.13 | 0.15 |
| OT2 | GCCATCTTGCCAAGAAAAAG | 1049 | 0.12 | 0.09 | 0.03 |
| OT3 | GCCATACCTGCCATGAATGAG | 1050 | 0.2 | 0.19 | 0.01 |
| OT4 | GCCATCCTGACAGGAATGAG | 1051 | 0.24 | 0.38 | -0.14 |
| OT5 | ACCATCCTGCAAAGAATGAT | 1052 | 0.18 | 0.24 | -0.06 |
| OT6 | GCCATCCAATAAGAATGAG | 1053 | 0.69 | 0.32 | 0.37 |
| OT7 | GCCATCCTGACAAGTATGAG | 1054 | 0.29 | 0.22 | 0.07 |
| OT8 | CCATACCTGCCAAGAATGAA | 1055 | 0.18 | 0.15 | 0.03 |
| OT9 | TGCATCCTGCCAAAAATGGG | 1056 | 0.06 | 0.08 | -0.02 |
| OT10 | TGCATCCTGCCAAGAAGAAG | 1057 | 0.06 | 0.08 | -0.02 |
| OT11 | GCCATCCTCCAAGAATGCT | 1058 | 0.13 | 0.13 | 0 |
| OT12 | GCCATCTGCAAGAAGGAG | 1059 | 0.11 | 0.19 | -0.08 |
| OT13 | GCCATCCTATCAAGAATAAA | 1060 | 0.22 | 0.2 | 0.02 |
| OT14 | TCCATCCTGTAAGAATGAG | 1061 | 0.03 | 0.05 | -0.02 |
| OT15 | GGCCATCTGCCAAGAAGGAT | 1062 | 0.12 | 0.13 | -0.01 |
| OT16 | ACCATCCTGCCAGCAATGTG | 1063 | 0.17 | 0.12 | 0.05 |
| OT17 | TCCATCCTACTAAGAATGAG | 1064 | 0.11 | 0.13 | -0.02 |
| OT18 | GGTATCCTGCCAAGAATGGA | 1065 | 0.09 | 0.1 | -0.01 |
| OT19 | TCCATCCTGCCAAGAATTGC | 1066 | 0.14 | 0.07 | 0.07 |
| OT20 | GCCATCTGCAAGAATGAG | 1067 | 0.15 | 0.18 | -0.03 |
| OT21 | GCCATCCTGCAAATATGAG | 1068 | 0.04 | 0.07 | -0.03 |
| OT22 | ACCATCCTGTCAAGAATCAA | 1069 | 0.2 | 0.15 | 0.05 |
| OT23 | GCCATACTAACAAGAATGAG | 1070 | 0.25 | 0.23 | 0.02 |
| OT24 | GTGATCCTGCCAGGAATAAG | 1071 | 0.08 | 0.11 | -0.03 |
| OT25 | GCCATCAAGCAAGAATGAG | 1072 | 0.3 | 0.27 | 0.03 |
| OT26 | GCCATCCTCACAAGTATGAG | 1073 | 0.19 | 0.22 | -0.03 |
| OT27 | ACCATCCAGCAAGAATGAG | 1074 | 0.43 | 0.32 | 0.11 |
| OT28 | GCCATATGCCAAAAAGGAG | 1075 | 0.24 | 0.24 | 0 |
| OT29 | GACATCCTGTCAAGGATCAG | 1076 | 0.21 | 0.16 | 0.05 |
| OT30 | GCCATAGCCAAAAATGAA | 1077 | 0.18 | 0.27 | -0.09 |
| OT31 | GCCATAAGCCAAAGAATGAC | 1078 | 0.09 | 0 | 0.09 |
| OT32 | GCCATCCTAACAAGTATGAG | 1079 | 0.25 | 0.45 | -0.2 |
| OT33 | CATATCCTGCCAGAATGAG | 1080 | 0.15 | 0.21 | -0.06 |
| OT34 | TACATCCTACCAAGGAATCAG | 1081 | 0.29 | 0.26 | 0.03 |
| OT35 | CCCATCCTGCCAAGAAGTGT | 1082 | 0.08 | 0.06 | 0.02 |
| OT36 | GCCATCCTACAAAAATGAG | 1083 | 0.16 | 0.21 | -0.05 |
| OT37 | GTCATCCTGCCAGGAATGAA | 1084 | 0.09 | 0.07 | 0.02 |
| OT38 | GCCATATCTGCCAAGAATGCG | 1085 | 0.16 | 0.16 | 0 |
| OT39 | TCCATCCTGTCAAGAATGTG | 1086 | 0.05 | 0.04 | 0.01 |
| OT40 | TCCATCCTCCAGAATGAG | 1087 | 0.07 | 0.08 | -0.01 |
| OT41 | GCCATGCTGCCAAGAATGAT | 1088 | 0.15 | 0.16 | -0.01 |
| OT42 | GCTATCCTGCCAGAATGAG | 1089 | 0.07 | 0.07 | 0 |
| OT43 | TGCATCCTGACAAGAAATAG | 1090 | 0.34 | 0.24 | 0.1 |
| OT44 | TCCATAGCCAAGAATGAG | 1091 | 0.43 | 0.27 | 0.16 |
| OT45 | ACCATCTGTCAAGAATGAG | 1092 | 0.26 | 0.21 | 0.05 |
| OT46 | GCCATCCCGCCAGGAATTAT | 1093 | 0.08 | 0.07 | 0.01 |
| OT47 | ACCATCCTTCCAAGAAGATG | 1094 | 0.14 | 0.12 | 0.02 |

[0959] GA459, GA460, and GA461 were similarly also assessed for off-target editing as shown in Tables 12, 13, and 14, respectively. While the on-target site, for each guide, shows high editing efficiency in the treated groups compared to the control groups, there is little to no off-target editing observed at candidate off-target sites.

TABLE 12
GA459 validation against 6 potential off-target candidate sites in human
primary hepatocytes

| | | SUM Editing %- Human Primary Hepatocytes | | | | |
|---|---|---|---|---|---|---|
| GA459 | | Treat | Treat | Untreated | Untreated | Untreated |
| ID | Sequence (5′-3′) | rep 1 | rep 2 | rep 1 | rep 2 | rep 3 |
| On- | GCAACTTACCCAGAGGCAA | 14.17 | 14.29 | 0.67 | 0.57 | 0.73 |
| target | A (SEQ ID NO: 468) | | | | | |
| OT1 | ACAAATTACCCAGAGGAAA | 1.19 | 1.25 | 1.31 | 1.28 | 1.27 |
| | A (SEQ ID NO: 1095) | | | | | |
| OT3 | TCAACTTACCCAGAGTCAA | 0.98 | 0.82 | 0.63 | 0.68 | 0.8 |
| | A (SEQ ID NO: 1096) | | | | | |
| OT4 | GCAACTTGCCCAGAGGCAC | 0.92 | 1.07 | 0.87 | 0.99 | 0.79 |
| | A (SEQ ID NO: 1097) | | | | | |
| OT5 | GCAACATACCCAGTGGCAA | 1.07 | 0.91 | 0.87 | 0.86 | 0.92 |
| | A (SEQ ID NO: 1098) | | | | | |
| OT6 | GCAGCCTACCCAGAGGCAA | 1.02 | 1.1 | 0.97 | 1 | 1.05 |
| | A (SEQ ID NO: 1099) | | | | | |
| OT7 | GCAACTCCCCCAGAGGCAA | 1.45 | 1.4 | 1.25 | 1.13 | 1.37 |
| | A (SEQ ID NO: 1100) | | | | | |

TABLE 13
GA460 validation against 3 potential off-target candidate sites in human
primary hepatocytes

| | | SUM Editing %- Human Primary Hepatocytes | | | | |
|---|---|---|---|---|---|---|
| GA460 | | Treat | Treat | Untreated | Untreated | Untreated |
| ID | Sequence (5′-3′) | rep 1 | rep 2 | rep 1 | rep 2 | rep 3 |
| On- | TATAGGAAAACCAGTGAGT | 76.4 | 74.3 | 1.54 | 1.17 | 1.41 |
| target | C (SEQ ID NO: 469) | | | | | |
| OT1 | TAGAGGAAAACCAGTCAGT | 1.44 | 1.6 | 1.51 | 1.35 | 1.61 |
| | C (SEQ ID NO: 1100) | | | | | |
| OT2 | CATAGGAAAACCAGTGAGT | 5.67 | 6.6 | 1.18 | 0.98 | 1.24 |
| | T (SEQ ID NO: 1101) | | | | | |
| OT3 | TAAAGGAAAACCAGTGGGT | 1.26 | 1.29 | 1.31 | 1.02 | 1.53 |
| | C (SEQ ID NO: 1102) | | | | | |

TABLE 14
GA461 validation against 4 potential off-target candidate sites in human
primary hepatocytes

| | | SUM Editing %- Human Primary Hepatocytes | | | | |
|---|---|---|---|---|---|---|
| GA461 | | Treat | Treat | Untreated | Untreated | Untreated |
| ID | Sequence (5′-3′) | rep 1 | rep 2 | rep 1 | rep 2 | rep 3 |
| On- | TACTCACCTCTGCATGCTC | ND | 58.9 | 0.39 | 0.37 | 0.35 |
| target | A (SEQ ID NO: 470) | | | | | |
| OT1 | TACACAACTGTGCATGCTC | 0.93 | 0.95 | 0.89 | 0.86 | 0.82 |
| | A (SEQ ID NO: 1104) | | | | | |
| OT2 | TATTCACCTCTGCATGCTC | 0.17 | 0.18 | 0.23 | 0.16 | 0.2 |
| | T (SEQ ID NO: 1105) | | | | | |
| OT3 | TACTTACCTCTGCTTGCTC | 0.28 | 0.35 | 0.28 | 0.23 | 0.34 |
| | A (SEQ ID NO: 1106) | | | | | |
| OT4 | TACACACCTCTACATGCTC | 0.67 | 0.94 | 0.75 | 0.62 | ND |
| | A (SEQ ID NO: 1107) | | | | | |

[0960] Table 15 provides some results for off-target editing with the GA457 guide.

[0961] Table 16 provides some results for off-target editing with the GA460 guide.

[0962] Table 17 provides some results for off-target editing with the GA461 guide.

[0963] Results presented in Tables 11, 13, 14, 15, 16, and 17 are to be understood to be representative of results that may be achieved in accordance with the teachings provided herein. Compositions for editing a TTR gene according to the invention may produce total off-target editing activity that varies from the activity set forth in Table 11, 13, 14, 15, 16, or 19 or discussed regarding GA457, 460, or 461. For example, the compositions may produce total off-target editing activity that varies from the activity set forth in Table 11, 13, 14, 15, 16, or 17 or discussed regarding GA457, 460, or 461 by 10% or more, 20% or more, 30% or more, 40% or more, 50% or more, 60% or more, 70% or more, 80% or more, 90% or more, or 100% or more, for one or more off target site set forth in Table 11, 13, 14, 15, 16, or 17 or discussed regarding GA457, 460, or 461. In some embodiments, the compositions provide total off-target editing activity that is within 100%, within 90%, within 80%, with 70%, within 60%, within 50%, within 40%, within 30% or more, within 20% or more, or within 10% of the activity as set forth in Table 11, 13, 14, 15, 16, or 17 or discussed regarding GA457, 460, or 461 for one or more site set forth in Table 11, 13, 14, 15, 16, or 17 or discussed regarding GA457, 460, or 461. In some embodiments, the compositions produce off-target editing activity that is less than or equal to the activity set forth in Table 11, 13, 14, 15, 16, or 17 or discussed regarding GA457, 460, or 461 for one or more site set forth in Table 11, 13, 14, 15, 16, or 17 or discussed regarding GA457, 460, or 461. In some embodiments, the compositions produce no off-target editing activity for one or more site set forth in Table 11, 13, 14, 15, 16, or 17 or discussed regarding GA457, 460, or 461.

TABLE 15
Some GA457 Candidate Off-target Sites

| | | | SEQ | |
|---|---|---|---|---|
| | | | ID | |
| Chromosome | Location | Sequence (5′-3′) | NO: | Alignment |
| 1 | 214915487 | TGCATCCTGCCAAAAATGGGGAG | 1108 | X50 |
| 2 | 162088240 | GCCATCTTGCCAAGAAAAAGGGG | 1109 | X30 |
| 3 | 143033429 | AACATCCTGCAAGAATAAGAAG | 1110 | RNA41 |
| 4 | 148246005 | GCCATCCAATAAGAATGAGTGG | 1111 | RNA31 |
| 5 | 171975758 | GTCATCCTGCCAAAATAAGGAGG | 1112 | X60 |
| 6 | 11558428 | CCCATACAGCCAAGAATGAGAAA | 1113 | X50 |
| 7 | 136711066 | TCCATCCTACTAAGAATGAGGAG | 1114 | X40 |
| 8 | 64649745 | ACCATCCTGACAAGTGTGAGGCA | 1115 | X60 |
| 9 | 13461786 | GTGATCCTGCCAGGAATAAGGAG | 1116 | X50 |
| 10 | 84701101 | GCCACCCTCCAAGGATCTGAGG | 1117 | RNA41 |
| 11 | 36962784 | GCCATACTAACAAGAATGAGGTG | 1118 | X40 |
| 12 | 18423002 | GCCATCCTCAAGAATGGGAAA | 1119 | RNA32 |
| 13 | 109466404 | ACCATCCTGTCAAGAATCAAGAG | 1120 | X50 |
| 14 | 43842189 | GCCAACCTGACAAATGTGAGG | 1121 | RNA32 |
| 15 | 38417527 | ACCATCCTTCCAAGAAGATGGGG | 1122 | X50 |
| 16 | 19426632 | GCCATCCAGCCAAGCAAGAAGGG | 1123 | X40 |
| 17 | 42774058 | GTCATCACTGCCAAGAACAAGAGG | 1124 | DNA31 |
| 18 | 6852692 | GCCATCCTGTAAGAATAAGGAT | 1125 | RNA41 |
| 19 | 55221349 | ACCATCCTGCCAGCAATGTGAGG | 1126 | X40 |
| 20 | 56309168 | TCCATCCTGAAGAATGAATAG | 1127 | RNA32 |
| 21 | 40793316 | GCCATATCTGCCAAGAATGCGGAG | 1128 | DNA31 |
| 22 | 34535097 | GATATCCTCACAAGAATGAGTGA | 1129 | X50 |
| X | 54383781 | GCTCTACTGCCAAGAAAGTGG | 1130 | RNA32 |
| Y | 6961334 | GCCATCCACCAAGAAAGCGGAG | 1131 | RNA41 |

[0964] Additional examples of GA457 off-target sites are presented in U.S. Provisional Patent Application No. 63/322,182, filed Mar. 21, 2022.

TABLE 16
Some GA460 Candidate Off-target Sites

| | | | SEQ ID | |
|---|---|---|---|---|
| Chromosome | Location | Sequence | NO: | Alignment |
| 1 | 114689517 | TATAAGAAAACCAGTGTCTCTGG | 1132 | X30 |
| 2 | 165173430 | TATAGTGAACCAGTGAGGCAGG | 1133 | RNA31 |
| 3 | 56975861 | TGTAGAAAAACCAGTGAATAAGA | 1134 | X50 |
| 4 | 175627437 | GATAGGAAAACCATGAGGGGGT | 1135 | RNA41 |
| 5 | 115033087 | TATAGGAAACCAATGAGTGCTG | 1136 | RNA31 |
| 6 | 132497708 | TATAGGTAAACCAGAGTAGGC | 1137 | RNA32 |
| 7 | 40539970 | AGTAGGAAAACCAGTATATAGGG | 1138 | X60 |
| 8 | 77342779 | AATAGGAAAACCATTTTCAGG | 1139 | RNA32 |
| 9 | 73825991 | AATAGGAAAACCAGTAAAATAGG | 1140 | X50 |
| 10 | 112702031 | CATACGAAGTCCATGAGTCAGG | 1141 | RNA41 |
| 11 | 60264073 | ATATGGAAAACCAGAGAATCAGG | 1142 | X60 |
| 12 | 103497054 | GATAGAAACACCATGAATCAGG | 1143 | RNA41 |
| 13 | 31477698 | TATATGAAACCAGTAAGTTTGG | 1144 | RNA31 |
| 14 | 91758013 | TATAGGTGTAAACCAGTGTGCCTAG | 1145 | DNA42 |
| 15 | 28238271 | TATAGGAGAAACAGTGAATAGGA | 1146 | X50 |
| 16 | 74819495 | AAAATGTAAACCAGTAAGCCCGG | 1147 | X60 |
| 17 | 44943044 | TGTAGGAAGAACCAGTGGATCGGG | 1148 | DNA31 |
| 18 | 1915908 | AAAAGGAAAGCCAGTGACCTGG | 1149 | RNA41 |
| 19 | 44246762 | AAATAGAAAACCAGTAAGTCATG | 1150 | X60 |
| 20 | 24558049 | TATAGGAAAACAGGAACTCTGG | 1151 | RNA31 |
| 21 | 13185396 | TATAATAAAACCAGTGATAAGGG | 1152 | X50 |
| 22 | 38987774 | TGTAGGAAAACATATGATCAGG | 1153 | RNA41 |
| X | 134161037 | AATAGGATAACCAGTCAGTAGGG | 1154 | X40 |
| Y | 15254846 | TATAACATAACCAATAGGTCAGG | 1155 | X60 |

[0965] Additional examples of GA460 off-target sites are presented in U.S. Provisional Patent Application No. 63/322,182, filed Mar. 21, 2022.

TABLE 17
Some GA461 Candidate Off-target sites

| | | | SEQ | |
|---|---|---|---|---|
| | | | ID | |
| Chromosome | Location | Sequence (5′-3′) | NO: | Alignment |
| 1 | 110474222 | TACTCACCTCTACATGCTCAGTG | 1156 | X20 |
| 2 | 136311439 | TACAGCACCTCTGCATTGCCAGGG | 1157 | DNA41 |
| 3 | 159697502 | TATTCACCTCTGCATCTCCAGGG | 1158 | X40 |
| 4 | 3846305 | CTCTCACCTCTGCATGACAAGC | 1159 | RNA41 |
| 5 | 174698295 | TACTCACAATGCATGCTAAAGG | 1160 | RNA31 |
| 6 | 31933576 | TACTCACCTCTGCCTTCCTTTGT | 1161 | X60 |
| 7 | 53373361 | TTATCACCCTGCATGTTCAGGG | 1162 | RNA31 |
| 8 | 77161406 | TACTGACCTTTCCATCTCACTG | 1163 | RNA41 |
| 9 | 101247864 | TACTCACTCAGCATGTTCAGAG | 1164 | RNA31 |
| 10 | 4684859 | GAATAACCTCTGATGGTCAAGG | 1165 | RNA41 |
| 11 | 85210644 | TATTCACCTCTGCATGCTCTGAG | 1166 | X30 |
| 12 | 117261587 | TATTCAGCAATGCATGTCAAGG | 1167 | RNA41 |
| 13 | 94452599 | TACTTACCTTACATGTTCAAGG | 1168 | RNA31 |
| 14 | 64054638 | TACTCAACTCTGCTGCTATAGC | 1169 | RNA41 |
| 15 | 95108931 | TACTCAACTCTGCTGCTCTAGG | 1170 | RNA21 |
| 16 | 56094894 | TACTAACCTTGCCAGCTGAGGG | 1171 | RNA41 |
| 17 | 71161191 | TGCTCACCCCACATGCTCATGG | 1172 | RNA31 |
| 18 | 3284286 | TTTTCTACTCTGCATAATCATGG | 1173 | X60 |
| 19 | 45241812 | ACCTCACCTCTGCCTGCTCTGGG | 1174 | X40 |
| 20 | 13122061 | TACTCAACTGCATTCTCAGGG | 1175 | RNA22 |
| 21 | 45735600 | CACTCACACTACATGCTCTTGG | 1176 | RNA41 |
| 22 | 20392740 | TCCACACCTCTCGGCAAGCTGAGGG | 1177 | DNA42 |
| X | 39842774 | TATATACCTCTGCATGTTCAGAG | 1178 | X50 |
| Y | 20738820 | TAGACACATAAGCATGCTCACAG | 1179 | X60 |

[0966] Additional examples of GA461 off-target sites are presented in U.S. Provisional Patent Application No. 63/322,182, filed Mar. 21, 2022.

TABLE 18
ABE variant sequences
MA004 mRNA and protein sequences

| Region | Sequence | |
|---|---|---|
| Full | mRNA | Au′GAGCGAGGu′GGAGu′u′CAGCCACGAGu′ACu′GGAu′GCGGCAC |
| sequence | | GCCCu′GACCCu′GGCCAAGCGGGCCCGGGACGAGCGGGAGGu′GCCCG |
| | | u′GGGCGCCGu′GCu′GGu′GCu′GAACAACCGGGu′GAu′CGGCGAGG |
| | | GCu′GGAACCGGGCCAu′CGGCCu′GCACGACCCCACCGCCCACGCCGA |
| | | GAu′CAu′GGCCCu′GCGGCAGGGGGGCCu′GGu′GAu′GCAGAACu′A |
| | | CCGGCu′GAu′CGACGCCACCCu′Gu′ACGu′GACCu′u′CGAGCCCu′ |
| | | GCGu′GAu′Gu′GCGCCGGCGCCAu′GAu′CCACAGCCGGAu′CGGCCG |
| | | GGu′GGu′Gu′u′CGGCGu′GCGGAACGCCAAGACCGGCGCCGCCGGCA |
| | | GCCu′GAu′GGACGu′GCu′GCACCACCCCGGCAu′GAACCACCGGGu′ |
| | | GGAGAu′CACCGAGGGCAu′CCu′GGCCGACGAGu′GCGCCGCCCu′GC |
| | | u′Gu′GCCGGu′u′Cu′u′CCGGAu′GCCCCGGCGGGu′Gu′u′CAACG |
| | | CCCAGAAGAAGGCCCAGAGCAGCACCGACAGGAAAu′AAGAGAGAAAAG |
| | | AAGAGu′AAGAAGAAAu′Au′AAGAGCCACCAGCGGCGGCAGCAGCGGC |
| | | GGCAGCAGCGGCAGCGAGACACCCGGCACCAGCGAGAGCGCCACCCCCG |
| | | AGAGCAGCGGCGGCAGCAGCGGCGGCAGCGACAAGAAGu′ACAGCAu′C |
| | | GGCCu′GGCCAu′CGGCACCAACAGCGu′GGGCu′GGGCCGu′GAu′CA |
| | | CCGACGAGu′ACAAGGu′GCCCAGCAAGAAGu′u′CAAGGu′GCu′GGG |
| | | CAACACCGACCGGCACAGCAu′CAAGAAGAACCu′GAu′CGGCGCCCu′ |
| | | GCu′Gu′u′CGACAGCGGCGAGACAGCCGAGGCCACCCGGCu′GAAGCG |
| | | GACCGCCCGGCGGCGGu′ACACCCGGCGGAAGAACCGGAu′Cu′GCu′A |
| | | CCu′GCAGGAGAu′Cu′u′CAGCAACGAGAu′GGCCAAGGu′GGACGAC |
| | | AGCu′u′Cu′u′CCACCGGCu′GGAGGAGAGCu′u′CCu′GGu′GGAGG |
| | | AGGACAAGAAGCACGAGCGGCACCCCAu′Cu′u′CGGCAACAu′CGu′G |
| | | GACGAGGu′GGCCu′ACCACGAGAAGu′ACCCCACCAu′Cu′ACCACCu |
| | | ′GCGGAAGAAGCu′GGu′GGACAGCACCGACAAGGCCGACCu′GCGGCu |
| | | ′GAu′Cu′ACCu′GGCCCu′GGCCCACAu′GAu′CAAGu′u′CCGGGGC |
| | | CACu′u′CCu′GAu′CGAGGGCGACCu′GAACCCCGACAACAGCGACGu |
| | | ′GGACAAGCu′Gu′u′CAu′CCAGCu′GGu′GCAGACCu′ACAACCAGC |
| | | u′Gu′u′CGAGGAGAACCCCAu′CAACGCCAGCGGCGu′GGACGCCAAG |
| | | GCCAu′CCu′GAGCGCCCGGCu′GAGCAAGAGCCGGCGGCu′GGAGAAC |
| | | Cu′GAu′CGCCCAGCu′GCCCGGCGAGAAGAAGAACGGCCu′Gu′u′CG |
| | | GCAACCu′GAu′CGCCCu′GAGCCu′GGGCCu′GACCCCCAACu′u′CA |
| | | AGAGCAACu′u′CGACCu′GGCCGAGGACGCCAAGCu′GCAGCu′GAGC |
| | | AAGGACACCu′ACGACGACGACCu′GGACAACCu′GCu′GGCCCAGAu′ |
| | | CGGCGACCAGu′ACGCCGACCu′Gu′u′CCu′GGCCGCCAAGAACCUu′G |
| | | AGCGACGCCAu′CCu′GCu′GAGCGACAu′CCu′GCGGGu′GAACACCG |
| | | AGAu′CACCAAGGCCCCCCu′GAGCGCCAGCAu′GAu′CAAGCGGu′AC |
| | | GACGAGCACCACCAGGACCu′GACCCu′GCu′GAAGGCCCu′GGu′GCG |
| | | GCAGCAGCu′GCCCGAGAAGu′ACAAGGAGAu′Cu′u′Cu′u′CGACCA |
| | | GAGCAAGAACGGCu′ACGCCGGCu′ACAu′CGACGGCGGCGCCAGCCAG |
| | | GAGGAGu′u′Cu′ACAAGu′u′CAu′CAAGCCCAu′CCu′GGAGAAGAu |
| | | ′GGACGGCACCGAGGAGCu′GCu′GGu′GAAGCu′GAACCGGGAGGACC |
| | | u′GCu′GCGGAAGCAGCGGACCUu′u′CGACAACGGCAGCAu′CCCCCAC |
| | | CAGAu′CCACCu′GGGCGAGCu′GCACGCCAu′CCu′GCGGCGGCAGGA |
| | | GGACu′u′Cu′ACCCCu′u′CCu′GAAGGACAACCGGGAGAAGAu′CGA |
| | | GAAGAu′CCu′GACCu′u′CCGGAu′CCCCu′ACu′ACGu′GGGCCCCC |
| | | u′GGCCCGGGGCAACAGCCGGu′u′CGCCu′GGAu′GACCCGCAAGAGC |
| | | GAGGAGACAAu′CACCCCCu′GGAACu′u′CGAGGAGGu′GGu′GGACA |
| | | AGGGCGCCAGCGCCCAGAGCu′u′CAu′CGAGCGGAu′GACCAACu′u′ |
| | | CGACAAGAACCu′GCCCAACGAGAAGGu′GCu′GCCCAAGCACAGCCu′ |
| | | GCu′Gu′ACGAGu′ACu′u′CACCGu′Gu′ACAACGAGCu′GACCAAGG |
| | | u′GAAGu′ACGu′GACCGAGGGCAu′GCGGAAGCCCGCCu′u′CCu′GA |
| | | GCGGCGAGCAGAAGAAGGCCAu′CGu′GGACCu′GCu′Gu′u′CAAGAC |
| | | CAACCGGAAGGu′GACCGu′GAAGCAGCu′GAAGGAGGACu′ACu′u′C |
| | | AAGAAGAu′CGAGu′GCu′u′CGACAGCGu′GGAGAu′CAGCGGCGu′G |
| | | GAGGACCGGu′u′CAACGCCAGCCu′GGGCACCu′ACCACGACCu′GCu |
| | | ′GAAGAu′CAu′CAAGGACAAGGACu′u′CCu′GGACAACGAGGAGAAC |
| | | GAGGACAu′CCu′GGAGGACAu′CGu′GCu′GACCCu′GACCCu′Gu′u |
| | | ′CGAGGACCGGGAGAu′GAu′CGAGGAGCGGCu′GAAGACCUu′ACGCCC |
| | | ACCu′Gu′u′CGACGACAAGGu′GAu′GAAGCAGCu′GAAGCGGCGGCG |
| | | Gu′ACACCGGCu′GGGGCCGGCu′GAGCCGGAAGCu′GAu′CAACGGCA |
| | | u′CCGGGACAAGCAGAGCGGCAAGACCAu′CCu′GGACu′u′CCu′CAA |
| | | GAGCGACGGCu′u′CGCCAACCGGAACu′u′CAu′GCAGCu′GAu′CCA |
| | | CGACGACAGCCu′GACCu′u′CAAGGAGGACAu′CCAGAAGGCCCAGGu |
| | | ′GAGCGGCCAGGGCGACAGCCu′GCACGAGCACAu′CGCCAACCu′GGC |
| | | CGGCAGCCCCGCCAu′CAAGAAGGGCAu′CCu′GCAGACCGu′GAAGGu |
| | | ′GGu′GGACGAGCu′GGu′GAAGGu′GAu′GGGCCGGCACAAGCCCGAG |
| | | AACAu′CGu′GAu′CGAGAu′GGCCCGGGAGAACCAGACCACCCAGAAG |
| | | GGCCAGAAGAACAGCCGGGAGCGGAu′GAAGCGGAu′CGAGGAGGGCAu |
| | | ′CAAGGAGCu′GGGCAGCCAGAu′CCu′GAAGGAGCACCCCGu′GGAGA |
| | | ACACCCAGCu′GCAGAACGAGAAGCu′Gu′ACCu′Gu′ACu′ACCu′GC |
| | | AGAACGGCCGGGACAu′Gu′ACGu′GGACCAGGAGCu′GGACAu′CAAC |
| | | CGGCu′GAGCGACu′ACGACGu′GGACCACAu′CGu′GCCCCAGAGCu′ |
| | | u′CCu′GAAGGACGACAGCAu′CGACAACAAGGu′GCu′GACCCGGAGC |
| | | GACAAGAACCGGGGCAAGAGCGACAACGu′GCCCAGCGAGGAGGu′GGu |
| | | ′GAAGAAGAu′GAAGAACu′ACu′GGCGGCAGCu′GCu′GAACGCCAAG |
| | | Cu′GAu′CACCCAGCGGAAGu′u′CGACAACCu′GACCAAGGCCGAGCG |
| | | GGGCGGCCu′GAGCGAGCu′GGACAAGGCCGGCu′u′CAu′CAAGCGGC |
| | | AGCu′GGu′GGAGACACGGCAGAu′CACCAAGCACGu′GGCCCAGAu′C |
| | | Cu′GGACAGCCGGAu′GAACACCAAGu′ACGACGAGAACGACAAGCu′G |
| | | Au′CCGGGAGGu′GAAGGu′GAu′CACCCu′CAAGAGCAAGCu′GGu′G |
| | | AGCGACu′u′CCGGAAGGACu′u′CCAGu′u′Cu′ACAAGGu′GCGGGA |
| | | GAu′CAACAACu′ACCACCACGCCCACGACGCCu′ACCu′GAACGCCGu |
| | | ′GGu′GGGCACCGCCCu′GAu′CAAGAAGu′ACCCCAAGCu′GGAGAGC |
| | | GAGu′u′CGu′Gu′ACGGCGACu′ACAAGGu′Gu′ACGACGu′GCGGAA |
| | | GAu′GAu′CGCCAAGAGCGAGCAGGAGAu′CGGCAAGGCCACCGCCAAG |
| | | u′ACu′u′Cu′u′Cu′ACAGCAACAu′CAu′GAACu′u′Cu′u′CAAGA |
| | | CCGAGAu′CACCCu′GGCCAACGGCGAGAu′CCGGAAGCGGCCCCu′GA |
| | | u′CGAGACAAACGGCGAGACAGGCGAGAu′CGu′Gu′GGGACAAGGGCC |
| | | GGGACu′u′CGCCACCGu′GCGGAAGGu′GCu′GAGCAu′GCCCCAGGu |
| | | ′GAACAu′CGu′GAAGAAGACCGAGGu′GCAGACCGGCGGCu′u′CAGC |
| | | AAGGAGAGCAu′CCu′GCCCAAGCGGAACAGCGACAAGCu′GAu′CGCC |
| | | CGGAAGAAGGACu′GGGACCCCAAGAAGu′ACGGCGGCu′u′CGACAGC |
| | | CCCACCGu′GGCCu′ACAGCGu′GCu′GGu′GGu′GGCCAAGGu′GGAG |
| | | AAGGGCAAGAGCAAGAAGCu′CAAGAGCGu′GAAGGAGCu′GCu′GGGC |
| | | Au′CACCAu′CAu′GGAGCGGAGCAGCu′u′CGAGAAGAACCCCAu′CG |
| | | ACu′u′CCu′GGAGGCCAAGGGCu′ACAAGGAGGu′GAAGAAGGACCU′ |
| | | GAu′CAu′CAAGCu′GCCCAAGu′ACAGCCu′Gu′u′CGAGCu′GGAGA |
| | | ACGGCCGGAAGCGGAu′GCu′GGCCAGCGCCGGCGAGCu′GCAGAAGGG |
| | | CAACGAGCu′GGCCCu′GCCCAGCAAGu′ACGu′GAACu′u′CCu′Gu′ |
| | | ACCu′GGCCAGCCACu′ACGAGAAGCu′GAAGGGCAGCCCCGAGGACAA |
| | | CGAGCAGAAGCAGCu′Gu′u′CGu′GGAGCAGCACAAGCACu′ACCu′G |
| | | GACGAGAu′CAu′CGAGCAGAu′CAGCGAGu′u′CAGCAAGCGGGu′GA |
| | | u′CCu′GGCCGACGCCAACCu′GGACAAGGu′GCu′GAGCGCCu′ACAA |
| | | CAAGCACCGGGACAAGCCCAu′CCGGGAGCAGGCCGAGAACAu′CAu′C |
| | | CACCu′Gu′u′CACCCu′GACCAACCu′GGGCGCCCCCGCCGCCu′u′C |
| | | AAGu′ACu′u′CGACACCACCAu′CGACCGGAAGCGGu′ACACCAGCAC |
| | | CAAGGAGGu′GCu′GGACGCCACCCu′GAu′CCACCAGAGCAu′CACCG |
| | | GCCu′Gu′ACGAGACACGGAu′CGACCu′GAGCCAGCu′GGGCGGCGAC |
| | | GAGGGCGCCGACAAGCGGACCGCCGACGGCAGCGAGu′u′CGAGAGCCC |
| | | CAAGAAGAAGCGGAAGGu′Gu′GAGCGGCCGCu′u′AAu′u′AAGCu′G |
| | | CCu′u′Cu′GCGGGGCu′u′GCCu′u′Cu′GGCCAu′GCCCu′u′Cu′u |
| | | ′Cu′Cu′CCCu′u′GCACCu′Gu′ACCu′Cu′u′GGu′Cu′u′u′GAAu |
| | | ′AAAGCCu′GAGu′AGGAAGu′Cu′AGA (SEQ ID NO: 1180) |
| | protein | MSEVEFSHEYWMRHALTLAKRARDEREVPVGAVLVLNNRVIGEGWNRAI |
| | | GLHDPTAHAEIMALRQGGLVMQNYRLIDATLYVTFEPCVMCAGAMIHSR |
| | | IGRVVFGVRNAKTGAAGSLMDVLHHPGMNHRVEITEGILADECAALLCR |
| | | FFRMPRRVFNAQKKAQSSTDSGGSSGGSSGSETPGTSESATPESSGGSS |
| | | GGSDKKYSIGLAIGTNSVGWAVITDEYKVPSKKFKVLGNTDRHSIKKNL |
| | | IGALLFDSGETAEATRLKRTARRRYTRRKNRICYLQEIFSNEMAKVDDS |
| | | FFHRLEESFLVEEDKKHERHPIFGNIVDEVAYHEKYPTIYHLRKKLVDS |
| | | TDKADLRLIYLALAHMIKFRGHFLIEGDLNPDNSDVDKLFIQLVQTYNQ |
| | | LFEENPINASGVDAKAILSARLSKSRRLENLIAQLPGEKKNGLFGNLIA |
| | | LSLGLTPNFKSNFDLAEDAKLQLSKDTYDDDLDNLLAQIGDQYADLFLA |
| | | AKNLSDAILLSDILRVNTEITKAPLSASMIKRYDEHHQDLTLLKALVRO |
| | | QLPEKYKEIFFDQSKNGYAGYIDGGASQEEFYKFIKPILEKMDGTEELL |
| | | VKLNREDLLRKQRTFDNGSIPHQIHLGELHAILRRQEDFYPFLKDNREK |
| | | IEKILTFRIPYYVGPLARGNSRFAWMTRKSEETITPWNFEEVVDKGASA |
| | | QSFIERMTNFDKNLPNEKVLPKHSLLYEYFTVYNELTKVKYVTEGMRKP |
| | | AFLSGEQKKAIVDLLFKTNRKVTVKQLKEDYFKKIECFDSVEISGVEDR |
| | | FNASLGTYHDLLKIIKDKDFLDNEENEDILEDIVLTLTLFEDREMIEER |
| | | LKTYAHLFDDKVMKQLKRRRYTGWGRLSRKLINGIRDKQSGKTILDFLK |
| | | SDGFANRNFMQLIHDDSLTFKEDIQKAQVSGQGDSLHEHIANLAGSPAI |
| | | KKGILQTVKVVDELVKVMGRHKPENIVIEMARENOTTQKGQKNSRERMK |
| | | RIEEGIKELGSQILKEHPVENTQLQNEKLYLYYLQNGRDMYVDQELDIN |
| | | RLSDYDVDHIVPQSFLKDDSIDNKVLTRSDKNRGKSDNVPSEEVVKKMK |
| | | NYWRQLLNAKLITQRKFDNLTKAERGGLSELDKAGFIKRQLVETRQITK |
| | | HVAQILDSRMNTKYDENDKLIREVKVITLKSKLVSDFRKDFQFYKVREI |
| | | NNYHHAHDAYLNAVVGTALIKKYPKLESEFVYGDYKVYDVRKMIAKSEQ |
| | | EIGKATAKYFFYSNIMNFFKTEITLANGEIRKRPLIETNGETGEIVWDK |
| | | GRDFATVRKVLSMPQVNIVKKTEVQTGGFSKESILPKRNSDKLIARKKD |
| | | WDPKKYGGFDSPTVAYSVLVVAKVEKGKSKKLKSVKELLGITIMERSSF |
| | | EKNPIDFLEAKGYKEVKKDLIIKLPKYSLFELENGRKRMLASAGELQKG |
| | | NELALPSKYVNFLYLASHYEKLKGSPEDNEQKOLFVEQHKHYLDEIIEQ |
| | | ISEFSKRVILADANLDKVLSAYNKHRDKPIREQAENIIHLFTLTNLGAP |
| | | AAFKYFDTTIDRKRYTSTKEVLDATLIHQSITGLYETRIDLSQLGGDEG |
| | | ADKRTADGSEFESPKKKRKV (SEQ ID NO: 1181) |
| 5′ UTR | mRNA | AGGAAAu′AAGAGAGAAAAGAAGAGu′AAGAAGAAAu′Au′AAGAGCCA |
| | | CC (SEQ ID NO: 1182) |
| TadA | mRNA | Au′GAGCGAGGu′GGAGu′u′CAGCCACGAGu′ACu′GGAu′GCGGCAC |
| | | GCCCu′GACCCu′GGCCAAGCGGGCCCGGGACGAGCGGGAGGu′GCCCG |
| | | u′GGGCGCCGu′GCu′GGu′GCu′GAACAACCGGGu′GAu′CGGCGAGG |
| | | GCu′GGAACCGGGCCAu′CGGCCu′GCACGACCCCACCGCCCACGCCGA |
| | | GAu′CAu′GGCCCu′GCGGCAGGGCGGCCu′GGu′GAu′GCAGAACu′A |
| | | CCGGCu′GAu′CGACGCCACCCu′Gu′ACGu′GACCu′u′CGAGCCCu′ |
| | | GCGu′GAu′Gu′GCGCCGGCGCCAu′GAu′CCACAGCCGGAu′CGGCCG |
| | | GGu′GGu′Gu′u′CGGCGu′GCGGAACGCCAAGACCGGCGCCGCCGGCA |
| | | GCCu′GAu′GGACGu′GCu′GCACCACCCCGGCAu′GAACCACCGGGu′ |
| | | GGAGAu′CACCGAGGGCAu′CCu′GGCCGACGAGu′GCGCCGCCCu′GC |
| | | u′Gu′GCCGGu′u′Cu′u′CCGGAu′GCCCCGGCGGGu′Gu′u′CAACG |
| | | CCCAGAAGAAGGCCCAGAGCAGCACCGAC (SEQ ID NO: 1183) |
| | protein | MSEVEFSHEYWMRHALTLAKRARDEREVPVGAVLVLNNRVIGEGWNRAI |
| | | GLHDPTAHAEIMALRQGGLVMQNYRLIDATLYVTFE PCVMCAGAMIHSR |
| | | IGRVVFGVRNAKTGAAGSLMDVLHHPGMNHRVEITEGILADECAALLCR |
| | | FFRMPRRVFNAQKKAQSSTD (SEQ ID NO: 1184) |
| Linker | mRNA | AGCGGCGGCAGCAGCGGCGGCAGCAGCGGCAGCGAGACACCCGGCACCA |
| between | | GCGAGAGCGCCACCCCCGAGAGCAGCGGCGGCAGCAGCGGCGGCAGC |
| TadA | | (SEQ ID NO: 1185) |
| and Cas9 | protein | SGGSSGGSSGSETPGTSESATPESSGGSSGGS (SEQ ID NO: 357) |
| nickase | | |
| Cas9 | mRNA | GACAAGAAGu′ACAGCAu′CGGCCu′GGCCAu′CGGCACCAACAGCGu′ |
| nickase | | GGGCu′GGGCCGu′GAu′CACCGACGAGu′ACAAGGu′GCCCAGCAAGA |
| | | AGu′u′CAAGGu′GCu′GGGCAACACCGACCGGCACAGCAu′CAAGAAG |
| | | AACCu′GAu′CGGCGCCCu′GCu′Gu′u′CGACAGCGGCGAGACAGCCG |
| | | AGGCCACCCGGCu′GAAGCGGACCGCCCGGCGGCGGu′ACACCCGGCGG |
| | | AAGAACCGGAu′Cu′GCu′ACCu′GCAGGAGAu′Cu′u′CAGCAACGAG |
| | | Au′GGCCAAGGu′GGACGACAGCu′u′Cu′u′CCACCGGCu′GGAGGAG |
| | | AGCu′u′CCu′GGu′GGAGGAGGACAAGAAGCACGAGCGGCACCCCAu′ |
| | | Cu′u′CGGCAACAu′CGu′GGACGAGGu′GGCCu′ACCACGAGAAGu′A |
| | | CCCCACCAu′Cu′ACCACCu′GCGGAAGAAGCu′GGu′GGACAGCACCG |
| | | ACAAGGCCGACCu′GCGGCu′GAu′Cu′ACCu′GGCCCu′GGCCCACAu |
| | | ′GAu′CAAGu′u′CCGGGGCCACu′u′CCu′GAu′CGAGGGCGACCu′G |
| | | AACCCCGACAACAGCGACGu′GGACAAGCu′Gu′u′CAu′CCAGCu′GG |
| | | u′GCAGACCu′ACAACCAGCu′Gu′u′CGAGGAGAACCCCAu′CAACGC |
| | | CAGCGGCGu′GGACGCCAAGGCCAu′CCu′GAGCGCCCGGCu′GAGCAA |
| | | GAGCCGGCGGCu′GGAGAACCu′GAu′CGCCCAGCu′GCCCGGCGAGAA |
| | | GAAGAACGGCCu′Gu′u′CGGCAACCu′GAu′CGCCCu′GAGCCu′GGG |
| | | CCu′GACCCCCAACu′u′CAAGAGCAACu′u′CGACCu′GGCCGAGGAC |
| | | GCCAAGCu′GCAGCu′GAGCAAGGACACCu′ACGACGACGACCu′GGAC |
| | | AACCu′GCu′GGCCCAGAu′CGGCGACCAGu′ACGCCGACCu′Gu′u′C |
| | | Cu′GGCCGCCAAGAACCu′GAGCGACGCCAu′CCu′GCu′GAGCGACAu |
| | | ′CCu′GCGGGu′GAACACCGAGAu′CACCAAGGCCCCCCu′GAGCGCCA |
| | | GCAu′GAu′CAAGCGGu′ACGACGAGCACCACCAGGACCu′GACCCu′G |
| | | Cu′GAAGGCCCu′GGu′GCGGCAGCAGCu′GCCCGAGAAGu′ACAAGGA |
| | | GAu′Cu′u′Cu′u′CGACCAGAGCAAGAACGGCu′ACGCCGGCu′ACAu |
| | | ′CGACGGCGGCGCCAGCCAGGAGGAGu′u′Cu′ACAAGu′u′CAu′CAA |
| | | GCCCAu′CCu′GGAGAAGAu′GGACGGCACCGAGGAGCu′GCu′GGu′G |
| | | AAGCu′GAACCGGGAGGACCu′GCu′GCGGAAGCAGCGGACCu′u′CGA |
| | | CAACGGCAGCAu′CCCCCACCAGAu′CCACCu′GGGCGAGCu′GCACGC |
| | | CAu′CCu′GCGGCGGCAGGAGGACu′u′Cu′ACCCCu′u′CCu′GAAGG |
| | | ACAACCGGGAGAAGAu′CGAGAAGAu′CCu′GACCu′u′CCGGAu′CCC |
| | | Cu′ACu′ACGu′GGGCCCCCu′GGCCCGGGGCAACAGCCGGu′u′CGCC |
| | | u′GGAu′GACCCGCAAGAGCGAGGAGACAAu′CACCCCCu′GGAACu′u |
| | | ′CGAGGAGGu′GGu′GGACAAGGGCGCCAGCGCCCAGAGCu′u′CAu′C |
| | | GAGCGGAu′GACCAACu′u′CGACAAGAACCu′GCCCAACGAGAAGGu′ |
| | | GCu′GCCCAAGCACAGCCu′GCu′Gu′ACGAGu′ACu′u′CACCGu′Gu |
| | | ′ACAACGAGCu′GACCAAGGu′GAAGu′ACGu′GACCGAGGGCAu′GCG |
| | | GAAGCCCGCCu′u′CCu′GAGCGGCGAGCAGAAGAAGGCCAu′CGu′GG |
| | | ACCu′GCu′Gu′u′CAAGACCAACCGGAAGGu′GACCGu′GAAGCAGCu |
| | | ′GAAGGAGGACu′ACu′u′CAAGAAGAu′CGAGu′GCu′u′CGACAGCG |
| | | u′GGAGAu′CAGCGGCGu′GGAGGACCGGu′u′CAACGCCAGCCu′GGG |
| | | CACCu′ACCACGACCu′GCu′GAAGAu′CAu′CAAGGACAAGGACu′u′ |
| | | CCu′GGACAACGAGGAGAACGAGGACAu′CCu′GGAGGACAu′CGu′GC |
| | | u′GACCCu′GACCCu′Gu′u′CGAGGACCGGGAGAu′GAu′CGAGGAGC |
| | | GGCu′GAAGACCu′ACGCCCACCu′Gu′u′CGACGACAAGGu′GAu′GA |
| | | AGCAGCu′GAAGCGGCGGCGGu′ACACCGGCu′GGGGCCGGCu′GAGCC |
| | | GGAAGCu′GAu′CAACGGCAu′CCGGGACAAGCAGAGCGGCAAGACCAu |
| | | ′CCu′GGACu′u′CCu′CAAGAGCGACGGCu′u′CGCCAACCGGAACu′ |
| | | u′CAu′GCAGCu′GAu′CCACGACGACAGCCu′GACCu′u′CAAGGAGG |
| | | ACAu′CCAGAAGGCCCAGGu′GAGCGGCCAGGGCGACAGCCu′GCACGA |
| | | GCACAu′CGCCAACCu′GGCCGGCAGCCCCGCCAu′CAAGAAGGGCAU′ |
| | | CCu′GCAGACCGu′GAAGGu′GGu′GGACGAGCu′GGu′GAAGGu′GAu |
| | | ′GGGCCGGCACAAGCCCGAGAACAu′CGu′GAu′CGAGAu′GGCCCGGG |
| | | AGAACCAGACCACCCAGAAGGGCCAGAAGAACAGCCGGGAGCGGAu′GA |
| | | AGCGGAu′CGAGGAGGGCAu′CAAGGAGCu′GGGCAGCCAGAu′CCu′G |
| | | AAGGAGCACCCCGu′GGAGAACACCCAGCu′GCAGAACGAGAAGCu′Gu |
| | | ′ACCu′Gu′ACu′ACCu′GCAGAACGGCCGGGACAu′Gu′ACGu′GGAC |
| | | CAGGAGCu′GGACAu′CAACCGGCu′GAGCGACu′ACGACGu′GGACCA |
| | | CAu′CGu′GCCCCAGAGCu′u′CCu′GAAGGACGACAGCAu′CGACAAC |
| | | AAGGu′GCu′GACCCGGAGCGACAAGAACCGGGGCAAGAGCGACAACGu |
| | | ′GCCCAGCGAGGAGGu′GGu′GAAGAAGAu′GAAGAACu′ACu′GGCGG |
| | | CAGCu′GCu′GAACGCCAAGCu′GAu′CACCCAGCGGAAGu′u′CGACA |
| | | ACCu′GACCAAGGCCGAGCGGGGCGGCCu′GAGCGAGCu′GGACAAGGC |
| | | CGGCu′u′CAu′CAAGCGGCAGCu′GGu′GGAGACACGGCAGAUu′CACC |
| | | AAGCACGu′GGCCCAGAu′CCu′GGACAGCCGGAu′GAACACCAAGu′A |
| | | CGACGAGAACGACAAGCu′GAu′CCGGGAGGu′GAAGGu′GAu′CACCC |
| | | u′CAAGAGCAAGCu′GGu′GAGCGACu′u′CCGGAAGGACu′u′CCAGu |
| | | ′u′Cu′ACAAGGu′GCGGGAGAu′CAACAACu′ACCACCACGCCCACGA |
| | | CGCCu′ACCu′GAACGCCGu′GGu′GGGCACCGCCCu′GAu′CAAGAAG |
| | | u′ACCCCAAGCu′GGAGAGCGAGu′u′CGu′Gu′ACGGCGACu′ACAAG |
| | | Gu′Gu′ACGACGu′GCGGAAGAu′GAu′CGCCAAGAGCGAGCAGGAGAU |
| | | ′CGGCAAGGCCACCGCCAAGu′ACu′u′Cu′u′Cu′ACAGCAACAu′CA |
| | | u′GAACu′u′Cu′u′CAAGACCGAGAu′CACCCu′GGCCAACGGCGAGA |
| | | u′CCGGAAGCGGCCCCu′GAu′CGAGACAAACGGCGAGACAGGCGAGAU |
| | | ′CGu′Gu′GGGACAAGGGCCGGGACu′u′CGCCACCGu′GCGGAAGGu′ |
| | | GCu′GAGCAu′GCCCCAGGu′GAACAu′CGu′GAAGAAGACCGAGGu′G |
| | | CAGACCGGCGGCu′u′CAGCAAGGAGAGCAu′CCu′GCCCAAGCGGAAC |
| | | AGCGACAAGCu′GAu′CGCCCGGAAGAAGGACu′GGGACCCCAAGAAGU |
| | | ′ACGGCGGCu′u′CGACAGCCCCACCGu′GGCCu′ACAGCGu′GCu′GG |
| | | u′GGu′GGCCAAGGu′GGAGAAGGGCAAGAGCAAGAAGCu′CAAGAGCG |
| | | u′GAAGGAGCu′GCu′GGGCAu′CACCAu′CAu′GGAGCGGAGCAGCu′ |
| | | u′CGAGAAGAACCCCAu′CGACu′u′CCu′GGAGGCCAAGGGCu′ACAA |
| | | GGAGGu′GAAGAAGGACCu′GAu′CAu′CAAGCu′GCCCAAGu′ACAGC |
| | | Cu′Gu′u′CGAGCu′GGAGAACGGCCGGAAGCGGAu′GCu′GGCCAGCG |
| | | CCGGCGAGCu′GCAGAAGGGCAACGAGCu′GGCCCu′GCCCAGCAAGu′ |
| | | ACGu′GAACu′u′CCu′Gu′ACCu′GGCCAGCCACu′ACGAGAAGCu′G |
| | | AAGGGCAGCCCCGAGGACAACGAGCAGAAGCAGCu′Gu′u′CGu′GGAG |
| | | CAGCACAAGCACu′ACCu′GGACGAGAu′CAu′CGAGCAGAu′CAGCGA |
| | | Gu′u′CAGCAAGCGGGu′GAu′CCu′GGCCGACGCCAACCu′GGACAAG |
| | | Gu′GCu′GAGCGCCu′ACAACAAGCACCGGGACAAGCCCAu′CCGGGAG |
| | | CAGGCCGAGAACAu′CAu′CCACCu′Gu′u′CACCCu′GACCAACCu′G |
| | | GGCGCCCCCGCCGCCu′u′CAAGu′ACu′u′CGACACCACCAu′CGACC |
| | | GGAAGCGGu′ACACCAGCACCAAGGAGGu′GCu′GGACGCCACCCu′GA |
| | | u′CCACCAGAGCAu′CACCGGCCu′Gu′ACGAGACACGGAu′CGACCu′ |
| | | GAGCCAGCu′GGGCGGCGAC (SEQ ID NO: 1186) |
| | protein | DKKYSIGLAIGTNSVGWAVITDEYKVPSKKFKVLGNTDRHSIKKNLIGA |
| | | LLFDSGETAEATRLKRTARRRYTRRKNRICYLQEIFSNEMAKVDDSFFH |
| | | RLEESFLVEEDKKHERHPIFGNIVDEVAYHEKYPTIYHLRKKLVDSTDK |
| | | ADLRLIYLALAHMIKFRGHFLIEGDLNPDNSDVDKLFIQLVQTYNQLFE |
| | | ENPINASGVDAKAILSARLSKSRRLENLIAQLPGEKKNGLFGNLIALSL |
| | | GLTPNFKSNFDLAEDAKLQLSKDTYDDDLDNLLAQIGDQYADLFLAAKN |
| | | LSDAILLSDILRVNTEITKAPLSASMIKRYDEHHQDLTLLKALVRQQLP |
| | | EKYKEIFFDQSKNGYAGYIDGGASQEEFYKFIKPILEKMDGTEELLVKL |
| | | NREDLLRKORTFDNGSIPHQIHLGELHAILRRQEDFYPFLKDNREKIEK |
| | | ILTFRIPYYVGPLARGNSRFAWMTRKSEETITPWNFEEVVDKGASAQSF |
| | | IERMTNFDKNLPNEKVLPKHSLLYEYFTVYNELTKVKYVTEGMRKPAFL |
| | | SGEQKKAIVDLLFKTNRKVTVKOLKEDYFKKIECFDSVEISGVEDRFNA |
| | | SLGTYHDLLKIIKDKDFLDNEENEDILEDIVLTLTLFEDREMIEERLKT |
| | | YAHLFDDKVMKQLKRRRYTGWGRLSRKLINGIRDKQSGKTILDFLKSDG |
| | | FANRNFMQLIHDDSLTFKEDIQKAQVSGQGDSLHEHIANLAGSPAIKKG |
| | | ILQTVKVVDELVKVMGRHKPENIVIEMARENQTTQKGQKNSRERMKRIE |
| | | EGIKELGSQILKEHPVENTQLQNEKLYLYYLQNGRDMYVDQELDINRLS |
| | | DYDVDHIVPQSFLKDDSIDNKVLTRSDKNRGKSDNVPSEEVVKKMKNYW |
| | | ROLLNAKLITQRKFDNLTKAERGGLSELDKAGFIKRQLVETRQITKHVA |
| | | QILDSRMNTKYDENDKLIREVKVITLKSKLVSDFRKDFQFYKVREINNY |
| | | HHAHDAYLNAVVGTALIKKYPKLESEFVYGDYKVYDVRKMIAKSEQEIG |
| | | KATAKYFFYSNIMNFFKTEITLANGEIRKRPLIETNGETGEIVWDKGRD |
| | | FATVRKVLSMPQVNIVKKTEVQTGGFSKESILPKRNSDKLIARKKDWDP |
| | | KKYGGFDSPTVAYSVLVVAKVEKGKSKKLKSVKELLGITIMERSSFEKN |
| | | PIDFLEAKGYKEVKKDLIIKLPKYSLFELENGRKRMLASAGELQKGNEL |
| | | ALPSKYVNFLYLASHYEKLKGSPEDNEQKOLFVEQHKHYLDEIIEQISE |
| | | FSKRVILADANLDKVLSAYNKHRDKPIREQAENIIHLFTLTNLGAPAAF |
| | | KYFDTTIDRKRYTSTKEVLDATLIHQSITGLYETRIDLSQLGGD (SEQ |
| | | ID NO: 1187) |
| Linker | mRNA | GAGGGCGCCGAC (SEQ ID NO: 1188) |
| between | Protein | EGAD (SEQ ID NO: 1189) |
| Cas9 | | |
| nickase | | |
| and NLS | | |
| Nuclear | mRNA | AAGCGGACCGCCGACGGCAGCGAGu′u′CGAGAGCCCCAAGAAGAAGCG |
| localization | | GAAGGu′Gu′GA (SEQ ID NO: 1190) |
| sequence | Protein | KRTADGSEFESPKKKRKV (SEQ ID NO: 190) |
| (NLS) | | |
| 3′ UTR | mRNA | GCGGCCGCu′u′AAu′u′AAGCu′GCCu′u′Cu′GCGGGGCu′u′GCCu |
| | | ′u′Cu′GGCCAu′GCCCu′u′Cu′u′Cu′Cu′CCCu′u′GCACCu′Gu′ |
| | | ACCu′Cu′u′GGu′Cu′u′u′GAAu′AAAGCCu′GAGu′AGGAAGu′Cu |
| | | ′AGA (SEQ ID NO: 1191) |

The mutations at amino acid positions 691 and 1135 of the nCas9 component and their corresponding nucleotide sequences are indicated as bold and underlined.
u′: N¹-methylpseudouridine
The first nucleotide in the 5′ UTR has a 2′-O-methyl modification.

[0967] Other ABE variants may be employed to effect editing of human TTR gene. Examples of such ABE variants are described International Patent Application PCT/US21/26729, filed on Apr. 9, 2021, entitled BASE EDITING OF PCSK9 AND METHODS OF USING SAME FOR TREATMENT OF DISEASE, and naming Verve Therapeutics, Inc. as the applicant.

### Example 3: In Vivo Non-human primate (NHP) Base Editing of TTR Gene

[0968] In this example, NHP surrogate sgRNAs (GA519 and GA520), corresponding to the human GA457 and GA460 sgRNAs described above, were prepared, and formulated with previously described ABE8.8 mRNA, encapsulated in lipid nanoparticles (LNPs), and intravenously dosed to NHPs. The study involved two distinct aspects.

[0969] The first aspect of the NHP in vivo study involved evaluating LNP1 and LNP2, which differed only in that LNP1 was formulated to encapsulate GA519 and ABE8.8 mRNA whereas LNP2 was formulated to encapsulate GA520 and ABE8.8 mRNA. The second aspect of the study involved formulating and evaluating a third LNP(LNP3). LNP3, like LNP1, was formulated to encapsulate GA519 and ABE8.8 mRNA. However, LNP 3 differed from LNP1 in that LNP3 included a GalNAc moiety constituent. In each aspect of the study, base editing efficiency, TTR protein expression, safety profiles, and pharmacokinetics were evaluated at multiple times post-infusion of the NHPs, as is further detailed below and illustrated in the accompanying figures.

### Part a: In Vivo NHP Evaluation of GA519 and GA520 Using Non-GaINAc LNPs

### LNP Preparation

[0970] In this first aspect of the NHP study, two LNPs (LNP1 and LNP2) were formulated, with LNP1 encapsulating GA519 and ABE8.8 mRNA and LNP2 encapsulate GA520 and ABE8.8 mRNA. The constituents of each of the LNPs are comprised of an ionizable amino lipid (iLipid), a neutral helper lipid, a PEG-Lipid and a sterol lipid as described in and at the ratios indicated in Table 19 below.

TABLE 19
LNP1/LNP2 Components

| LNP | | | Mol |
|---|---|---|---|
| Component | Lipid names | Lipid structure | % |
| Amino lipid (iLipid) | 3-((4,4-bis(octyloxy)butanoyl)oxy)-2- ((((3- (diethylamino)propoxy)carbonyl)oxy)meth- yl)propyl(9Z,12Z)-octadeca-9,12- dienoate* | [chemical structure] | 50 |
| Neutral helper lipid | 1,2-distearoyl-sn-glycero-3- phosphocholine (DSPC) | [chemical structure] | 9 |
| PEG-lipid | 1,2-dimyristoyl-rac-glycero-3- methoxypolyethylene glycol-2000 (PEG₂₀₀₀-DMG) | [chemical structure] | 3 |
| Sterol lipid | Cholesterol | [chemical structure] | 38 |

*described in International Published Patent Application WO 2015/095340 A1

[0971] It should be understood that the lipids in Table 19 may be substituted for other suitable lipids in the listed class. In some embodiments, for example, the LNP comprises the amino lipid VL422 described in the International published patent application WO 2022/060871 A¹. For example, the amino lipid may be VL422, or a pharmaceutically acceptable salt or solvate thereof:

[chemical structure]

[0972] It should be further understood that the mol % of lipids in Table 19 may be adjusted and that the mol % included in Table 19 are targeted excipient percentages of the LNP, which is intended to represent the aggregate mol % of all the LNPs formulated in a given batch and that specific LNPs within a batch may have varying mol %. Thus, it is contemplated herein that the mol % of one or more, or all of the LNP components set forth in Table 19 may be adjusted, for example, by +/−1-5%, +/−5-10%, or +/−10%-20%. It is further contemplated herein that the mol % of one or more, or all of the LNP components set forth in Table 19 with respect to a specific LNP formulated in a given batch of LNPs formulated in accordance with desired target excipient percentages, may vary from the targeted mol %, for example, by +/−1-5%, +/−5-10%, or +/−10%-20%, or even greater than +/−20%. Further, it should be understood that additional LNP components, including non-lipid components, may be added to the LNP components set-forth in Table 19. As set forth in Table 20, LNP 1 was formulated with sgRNA GA519 and LNP2 was formulated with GA520, which correspond respectively to the sgRNA GA457 and GA460, previously described. GA519 and GA520 were chemically synthesized and the sequences and chemical modifications of GA519 and GA520 are specified in Table 20.

TABLE 20
GA519 and GA520 TTR Gene Targeted Guides

| | | | | Equivalent | |
|---|---|---|---|---|---|
| | gRNA | | Protospacer | Human | gRNA Sequence (5′-3′) |
| LNP | ID | Species | (5′-3′) | gRNA | (spacers are in bold) |
| 1 | GA519 | Cyno | GCCATCCTGC | GA457 | gscscsAUCCUGCCAAGAAC |
| | | | CAAGAACGAG | | GAGgUUUUAGagcuaGaaau |
| | | | (SEQ ID NO: | | agcaaGUUaAaAuAaggcua |
| | | | 471) | | GUccGUUAucAAcuuGaaaa |
| | | | | | agugGcaccgagucggugcu |
| | | | | | ususus (SEQ ID NO: 1044) |
| 2 | GA520 | Cyno | TATAGGAAAA | GA460 | usasusAGGAAAACCAGUGA |
| | | | CCAGTGAGTC | | GUCgUUUUAGagcuaGaaau |
| | | | (SEQ ID NO: | | agcaaGUUaAaAuAaggcua |
| | | | 469) | | GUccGUUAucAAcuuGaaaa |
| | | | | | agugGcaccgagucggugcu |
| | | | | | ususus (SEQ ID NO: 497) |

Letters in the sequences: A = adenosine; C = cytidine; G = guanosine; U = uridine; a = 2′-O-methyladenosine; c = 2′-O-methylcytidine; g = 2′-O-methylguanosine; u = 2′-O-methyluridine; s = phosphorothioate (PS) backbone linkage. C = nucleotide that differs in NHP from human TTR sequence. Bold type in gRNA sequence denotes spacer sequence corresponding to Protospacer.

[0973] Notably as compared to GA457, GA519 hybridizes between positions 50,681,581 to 50,681,603 in exon 1 of the reference cynomolgus monkey genome (macFas5) and edits the adenosine at position 50,681,584 resulting in disruption of the full length TTR protein sequence by converting a methionine to a threonine amino acid and prohibiting protein translation (FIG. 8). GA519 is the cynomolgus surrogate of the human GA457 gRNA and maps to the analogous region of the human TTR locus as in FIG. 4 as previously described. The cynomolgus GA519 gRNA differs from GA457 by a single nucleotide at position 17 of the protospacer and is highlighted with an underline in Protospacer column of Table 20. Furthermore, GA519 and GA457 differ from one another in that the tracr region of GA519 incorporates chemical modifications (detailed in Table 20). The chemical modifications are designed for, or capable of, improving in vivo stability.

[0974] Similarly, as compared to GA460, GA520 hybridizes between positions 50,678,305 to 50,678,327 of exon 3 of the reference cynomolgus monkey genome (macFas5) and edits the adenosine at position 50,678,324 resulting in splicing acceptor disruption producing a truncated non-functional TTR protein (FIG. 9). The protospacer region for GA520 is identical to the human GA460 and maps to the analogous region of the human TTR locus as in FIG. 4 as previously described. GA520 and GA460 differ in the tracr region and incorporate chemical modifications, as detailed in the table above, that are designed for, or capable of, improving in vivo stability.

[0975] For reference, the targeted nucleotide for base editing is highlighted in bold in FIGS. 8 and 9. FIGS. 8 and 9 also identify the location of the spacer of GA519 and GA520 relative to the TTR gene as previously described.

[0976] LNP 1 and LNP2 were formulated using ABE 8.8 mRNA and GA519 and GA520, respectively, with an sgRNA: mRNA weight ratio of 1:1. In other words, the LNPs were formulated with an equal amount by weight of guide RNA as mRNA. The resulting LNPs encapsulating the sgRNAs and ABE 8.8 mRNA were filtered using 0.2-micron filters and frozen at −80° C. Physical characteristics of the formulated LNPs are summarized in Table 21.

TABLE 21
LNP1/LNP2 Characterization

| | Average | | RNA |
|---|---|---|---|
| | LNP size | | entrapment |
| LNP | (nm) | PDI | (%) |
| 1 | 68.6 | 0.022 | 95.7 |
| 2 | 68.6 | 0.029 | 96.2 |

PDI is Polydispersity Index

[0977] One of ordinary skill in the art would understand that the average LNP size, PDI and RNA entrapment values set forth in Table 21 are subject to measurement error or accuracy. It is also contemplated herein that the LNP size, PDI and RNA entrapment values set forth in Table 21 may be varied by +/−1-5%, +/−5-10%, or +/−10%-20%.

### Nhp Study Design

[0978] In this aspect of the study, female cynomolgus monkeys of Cambodian origin were used as study animals. A premedication regimen comprising dexamethasone and H1 and H2 antihistamines was administered to all animals on day-1 (approximately 24 hours prior to dosing) and day 1 (predose), at 30 to 60 minutes prior to test article dose administration. Three monkeys were dosed with LNP1 and 3 monkey were dosed with LNP 2 on day 1 of the study via a single IV infusion at a dose level of 3 mg of combined sgRNA and mRNA per kg of animal body weight and at a dose volume of 6 mL/kg (n=3/group).

[0979] Blood samples were collected from all animals predose for baseline measurement and post-dose at various time points on days 1 through 15 to assess biomarkers, cytokines, plasma iLipid and PEG-Lipid pharmacokinetics, and serum safety parameters.

[0980] Necropsies were performed on all animals at day 16. Liver biopsy samples were collected to assess TTR gene editing.

### Analysis of Editing Efficiency

[0981] The amount of gene editing in the liver was evaluated by next-generation sequencing

[0982] (NGS) of targeted polymerase chain reaction (PCR) amplicons at the TTR target site derived from genomic DNA extracted from the liver of the animal using the method described previously (Musunuru et al, Nature 593, no. 7859 (May 2021): 429-34. doi: 10.1038/s41586-021-03534-y). Percent editing was reported as the percent of all reads containing a nonreference allele at the target adenine.

[0983] FIG. 10 illustrates TTR editing efficiency of LNP1 as compared to LNP2. Notably, as illustrated in FIG. 10, the average hepatic TTR editing efficiency is higher in NHP treated with LNP1 (52%) compared to LNP2 (29%).

### Quantification of TTR Protein Expression in Serum

[0984] Serum was collected from all animals on days-10, −7, −5 pre-infusion and days 7, and 14 post LNP infusion for TTR protein analysis. Serum TTR was quantified using two methods. TTR protein levels were initially quantified using a custom TTR sandwich ELISA with the data obtained from that analysis presented in FIG. 11. Values for day −10, −7, and −5 were averaged to obtain the baseline value. Notably, LNP1 treated animals showed greater liver TTR editing, also showed greater plasma TTR reductions (−63% change from baseline on Day 14) when compared to LNP2 treated animals (3% change from baseline on Day 14). TTR protein collected from serum were also quantitated using liquid chromatography mass-spectrometry (LC-MS), in which four unique serum TTR peptide fragments were quantitated from each sample time point and the average of the results is reported. LC-MS serum TTR quantitation analysis using LC-MS is set forth in FIG. 12 and was notably consistent with the data obtained from the ELISA quantification in that it also demonstrated that LNP1 showed greater plasma TTR reductions (−73% change from baseline on day 14) when compared to LNP2 (−21% change from baseline on day 14).

[0985] Thus, as illustrated in FIGS. 10, 11 and 12, infusion of LNP1 and LNP2 in NHPs resulted in editing of the TTR gene in the liver, with LNP1 demonstrating greater editing than LNP2. The greater editing of LNP1 NHPs corresponded to a commensurate increase in the reduction in serum TTR concentrations in serum.

### Safety Analysis

[0986] Blood serum was collected from all animals at day-10, −7, −5 pre-infusion and 6, 24, 48, 96, 168, 240, and 336 hours post LNP infusion for safety analysis and specifically directed to observing changes in liver enzymes and cytokine levels. Serum chemistry parameters were directly measured from blood serum samples on a Beckman Coulter AU680 analyzer. Values for day −10, −7, and −5 were averaged to obtain the baseline value. Both LNP1 and LNP2 dosed animals showed transient alanine aminotransferase (FIG. 13A) elevations that peaked at 48 hours post end of infusion and returned to baseline levels 168 hours post end of infusion. Aspartate aminotransferase levels, illustrated in FIG. 13B, were also elevated by both LNP1 and LNP2 treatments, peaking at 6 hours post end of infusion and returning to baseline levels 96 hours post end of infusion. Serum lactate dehydrogenase concentrations, as illustrated in FIG. 14A, and glutamate dehydrogenase concentrations, as illustrated in FIG. 14B, were also found to be elevated shortly following administration of either LNP1 or LNP2 that returned to baseline levels 96-168 hours post end of infusion.

[0987] Serum concentrations of gamma-glutamyl transferase, illustrated in FIG. 15A, and alkaline phosphatase, FIG. 15B, were not changed by either LNP1 or LNP2 infusion. In addition, LNP1 and LNP2 treatment did not affect serum total bilirubin concentrations, as illustrated in FIG. 16. LNP1 and LNP2 dosed animals, each also showed elevated serum creatine kinase concentrations, as illustrated in FIG. 17, which in each case peaked at 6 hours and returned fully to baseline levels by 168 hours post end of infusion.

[0988] Serum was collected from all animals at day −10, −7, −5 pre-treatment and 24, 168, and 336 hours post LNP infusion for serum cytokine analysis. Cytokines were measured using a multiplexed sandwich immunoassay, where four (MCP-1, IL-6, IP-10, IL-1RA) cytokines are quantitated simultaneously from serum samples using the U-PLEX Biomarker Group 1 (monkey) Assay from Meso Scale Diagnostics (Rockville, MD). Values for day −10, −7, and −5 were averaged to obtain the baseline value. Both LNP1 and LNP2 dosed animals showed elevated serum IL-6 concentrations, as illustrated in FIG. 18, to a similar extent, peaking at 6 hours and returning to baseline by 24 hours post end of infusion. As further illustrated in FIG. 18, both LNP1 and LNP2 dosed animals showed increased serum IL-1RA that peaked at 6 hours and returned fully to baseline by 336 hours. Also, as illustrated in FIG. 18, neither LNP1 nor LNP2 had any measurable significant effect on serum MCP-1 or IP-10 concentrations.

[0989] Overall, the analysis of foregoing parameters showed that infusion of either LNP1 and LNP2 in monkeys produced a transient increase in liver enzymes and cytokines that resolves rapidly.

### Pharmacokinetics (PK) Evaluation

[0990] Blood samples were obtained (K2EDTA) for plasma PK analysis and determination of concentrations of the iLipid and PEGLipid excipients that comprised LNP1 and LNP2. After the end of the infusion, plasma samples were collected at 0.25, 2, 6, 24, 48, 96, 168, 240, and 336 hours post LNP infusion. Concentrations of the iLipid and PEG Lipids were measured using qualified LC-MS assays and are shown in FIG. 19A. Timepoints in which the lipids were below the limit of quantitation are not included in the figure. As illustrated in FIG. 19A, serum iLipid concentrations for LNP1 and LNP2 dosed animals continuously declined until approaching lower limit of quantitation (LLOQ) at 96 hour post LNP infusion. Similarly, as illustrated in FIG. 19B, serum PEG-Lipid concentrations for LNP1 and LNP2 dosed animals also rapidly declined reaching an LLOQ at 24 hours post end of infusion.

Part B: In Vivo NHP Evaluation of GA519 with GalNAc LNP

[0991] In further evaluation of GA519, an additional LNP(LNP3) was formulated to encapsulate the same GA519 and ABE8.8 mRNA at the 1:1 weight ratio and dosed intravenously to NHPs as previously described. LNP3 differs from LNP1 in that LNP3 was formulated with an additional GalNAc ligand excipient, as described in more detail below.

LNP preparation

[0992] The GalNAc LNPs (LNP3) formulated for this aspect of the study were comprised of the same iLipid, neutral helper lipid, PEG-Lipid and sterol lipid as described in connection with LNP1/LNP2, but unlike LNP1/LNP2, LNP3 also is comprised of a GalNAc conjugated lipid. The molar ratios of each constituent component of LNP3 are described in Table 22.

TABLE 22
LNP3 Components

| LNP | | | |
|---|---|---|---|
| Component | Lipid names | Lipid structure | Mol % |
| Amino lipid (iLipid) | 3-((4,4-bis(octyloxy)butanoyl)oxy)- 2-((((3- (diethylamino)propoxy)carbonyl) oxy)methyl)propyl(9Z,12Z)- octadeca-9,12-dienoate* | [chemical structure] | 50 |
| Neutral helper lipid | 1,2-distearoyl-sn-glycero-3- phosphocholine (DSPC) | [chemical structure] | 9 |
| PEG-lipid | 1,2-dimyristoyl-rac-glycero-3- methoxypolyethylene glycol-2000 (PEG₂₀₀₀-DMG) | [chemical structure] | 3 |
| Sterol lipid | Cholesterol | [chemical structure] | 37.95 |
| GalNAc- lipid | N²-(PEG-DSG)-N⁶-((C5- GalNAc)amido)-Lys-[bis((C5- GalNAc)propylamido)]amide or DSG-PEG-Lys-tris(GalNAc)** | [chemical structure] | 0.05 |

*described in International Published Patent Application WO 2015 095340 A1
**described in International Published Patent Application WO 2021/178725 A1

[0993] It should be understood that the lipids in Table 22 may be substituted for other suitable lipids in the listed class. For example, the amino lipid may be the following amino lipid, or a salt thereof:

[chemical structure]

[0994] It should be further understood that the mol % of lipids in Table 20 may be adjusted and that the mol % included in Table 20 are targeted excipient percentages of the LNP, which is intended to represent the aggregate mol % of all the LNPs formulated in a given batch and that specific LNPs within a batch may have varying mol %. Thus, it is contemplated herein that the mol % of one or more, or all of the LNP components set forth in Table 20 may be adjusted, for example, by +/−1-5%, +/−5-10%, or +/−10%-20%. It is further contemplated herein that the mol % of one or more, or all of the LNP components set forth in Table 20 with respect to a specific LNP formulated in a given batch of LNPs formulated in accordance with desired target excipient percentages, may vary from the targeted mol %, for example, by +/−1-5%, +/−5-10%, or +/−10%-20%, or even greater than +/−20%. Further, it should be understood that additional LNP components, including non-lipid components, may be added to the LNP components set-forth in Table 20.

[0995] In formulating LNP3, the GalNAc-Lipid was premixed with other LNP excipients referenced in Table 22 prior to in-line mixing with GA519 sgRNA and ABE 8.8 mRNA (at 1:1 weight ratio) to form LNP3. Rajeev et al., WO2021178725, includes a description of the synthesis and characterization of the GalNAc lipid. As with LNP1/LNP2, the resulting GalNAc-LNPs, LNP3, were filtered using 0.2-micron filters and frozen at −80° C. The physical characteristics of the formulated LNP3 is summarized in Table 23.

TABLE 23
LNP3 Characterization.

| | Average | | |
|---|---|---|---|
| | LNP size | | RNA |
| LNP | (nm) | PDI | entrapment |
| 3 | 61.92 | 0.055 | 98.7 |

[0996] One of ordinary skill in the art would understand that the average LNP size, PDI and RNA entrapment values set forth in Table 23 are subject to measurement error or accuracy. It is also contemplated herein that the LNP size, PDI and RNA entrapment values set forth in Table 23 may be varied by +/−1-5%, +/−5-10%, or +/−10%-20%.

### NHP Study Design

[0997] Male cynomolgus monkeys of Cambodian origin were used in this aspect of the study. A premedication regimen comprising dexamethasone and H1 and H2 antihistamines were administered to all animals on day-1 (approximately 24 hours prior to dosing) and day 1 (predose), between 30 and 60 minutes before test article dose administration. The LNP3 dosing formulations were administered once on day 1 of the study by IV infusion of two groups of 3 monkeys at dose levels of (i)₂ mg of combined sgRNA and mRNA per kg of animal body weight and at a dose volume of 6 mL/kg (n=3/group) for the first group of three monkeys and (ii)₃ mg of combined sgRNA and mRNA per kg of animal body weight and at a dose volume of 6 mL/kg (n=3/group) for the second group of three monkeys.

[0998] Blood samples were collected from all animals predose for baseline measurement and post infusion at various time points from days 1 through 35 to assess biomarkers, plasma iLipid and PEG pharmacokinetics, and serum safety parameters.

Necropsies were performed on day 36. Liver tissue samples were collected from all animals to assess TTR gene editing in the liver.

### Analysis of Editing Efficiency

[0999] The amount of gene editing in the liver was evaluated by next-generation sequencing (NGS) of targeted polymerase chain reaction (PCR) amplicons at the TTR target site derived from genomic DNA extracted from the liver as described previously (Musunuru et al., Nature 593, no. 7859 (May 2021): 429-34. doi: 10.1038/s41586-021-03534-y). Percent editing was reported as the percent of all reads containing a nonreference allele at the target adenine.

[1000] As set forth in FIG. 20, LNP3 led to similar levels of hepatic TTR editing efficiency at 2 mg/kg dosed monkeys (60%) as compared to 3 mg/kg dosed monkeys (63%).

### Quantification of TTR Protein Expression in Serum

[1001] Serum was collected at day-10, −7, −5 pre-infusion and 7, 14, 21, 28, and 35 days post end of infusion for TTR protein analysis. Serum TTR was initially quantified using a custom TTR sandwich ELISA with the data obtained from that analysis presented in FIG. 21. Values for day −10, −7, and −5 were averaged to obtain the baseline value. As illustrated in FIG. 21, both groups of LNP3 dosed animals showed marked reductions in serum TTR protein at the first timepoint (day 7) after dosing. These reductions were maintained for the duration of the study, reaching maximal reductions on day 28 of −84% and −91% change from baseline for the 2 mg/kg and 3 mg/kg monkey groups, respectively. To confirm the ELISA results, TTR protein was also quantitated by LC-MS, in which 4 unique TTR peptide fragments were quantitated in serum at each time point and the average of the 4 results is reported. LC-MS serum TTR quantitation, as illustrated in FIG. 22, confirmed that TTR was reduced at the first timepoint after infusion of the animals on day 7 and was maintained until necropsy on day 35. For the 2 mg/kg LNP3 dosed animals, maximal reduction of TTR protein was reached on day 35 (−82% change from baseline), while for the 3 mg/kg group maximal of TTR protein was reached on day 28 (−87% change from baseline).

[1002] Therefore, as described above and illustrated in the foregoing referenced figures, both the 2 mg/kg and 3 mg/kg LNP3 dosed NHPs resulted in marked relatively rapid liver TTR gene editing and corresponding reductions in serum TTR concentrations in protein.

### Safety Analysis

[1003] Blood serum was collected from each of the animals in the study at day-10, −7, −5 pre-infusion and 6, 24, 48, 96, 168, 336 hours, day 21, day 28, and day 35 post end of infusion for safety analysis and specifically directed at observing changes in liver enzymes and cytokine levels. Serum chemistry parameters were directly measured from blood serum samples on a Beckman Coulter AU680 analyzer. Values for day −10, −7, and −5 were averaged to obtain the baseline value. LNP3 dosed animals showed dose-dependent, transient alanine aminotransferase elevations as illustrated in FIG. 23A, which peaked at 24-48 hours post end of infusion and returned to baseline levels 336 hours post end of infusion. Aspartate aminotransferase levels, as illustrated in FIG. 23B, were elevated to a similar extent by both the 2 mg/kg and 3 mg/kg LNP3 doses, peaking at 6 hours post end of infusion and returning to baseline levels 168 hours post end of infusion. As illustrated in FIG. 24A, both the 2 mg/k and 3 mg/kg LNP3 doses elevated serum lactate dehydrogenase concentrations that returned to baseline levels by 168 hours post end of infusion. LNP3 also elevated glutamate dehydrogenase concentrations, as illustrated in FIG. 24B, in a dose-dependent manner, peaking at 24-hours, and returning to baseline levels 336 hours post end of infusion. Serum concentrations of gamma-glutamyl transferase and alkaline phosphatase, illustrated in FIGS. 25A and 25B, respectively, were not significantly changed by either LNP dose. In addition, LNP3 treatment did not significantly affect serum total bilirubin concentrations, as illustrated in FIG. 26. LNP3 elevated serum creatine kinase concentrations, as illustrated in FIG. 27, peaking at 6 hours post end of infusion then returning to baseline levels by 168 hours post end of infusion.

[1004] The analysis of the foregoing safety parameters in this aspect of the in vivo NHP study were consistent the prior aspect of the study in that they demonstrated that both doses of LNP3 produced a transient increase in liver enzymes that resolved rapidly within 2 weeks following dosing of the subjects.

### Pharmacokinetics (PK) Evaluation

[1005] Blood samples were obtained from all animals (K₂EDTA) for plasma PK analysis and determination of concentrations of the ionizable amino lipid (iLipid) and PEGLipid that comprised LNP3. After the end of the infusion, plasma samples were collected at 0.25, 2, 6, 24, 48, 96, 168, 240, and 336 hours post LNP3 infusion. Concentrations of iLipid and PEG-Lipid were measured using qualified LC-MS assays. Dose-dependent iLipid plasma exposure was observed, as illustrated in FIG. 28A, declining below the LLOQ by 96 hours post end of infusion. Dose dependent plasma exposure of PEG lipid was also observed, as illustrated in FIG. 28B, reaching the LLOQ by 24 hours post end of infusion.

[1006] The complete disclosure of all patents, patent applications, and publications, and electronically available material (including, for instance, nucleotide sequence submissions in, e.g., GenBank and RefSeq, and amino acid sequence submissions in, e.g., SwissProt, PIR, PRF, PDB, and translations from annotated coding regions in GenBank and RefSeq) cited herein are incorporated by reference. In the event that any inconsistency exists between the disclosure of the present application and the disclosure(s) of any document incorporated herein by reference, the disclosure of the present application shall govern. The foregoing detailed description and examples have been given for clarity of understanding only. No unnecessary limitations are to be understood therefrom. The invention is not limited to the exact details shown and described, for variations obvious to one skilled in the art will be included within the invention defined by the claims.

### Example 4: TTR Gene Editing by GA521 Guide RNA

[1007] This example illustrates gene editing by an exemplary modified guide RNA, GA521.

[1008] Exemplary guide RNA GA521 was transfected into primary human hepatocytes using MessengerMax transfection. GA521 disrupts the start codon AUG of the TTR gene by editing it to ACG with an A-to-G base editor (e.g., ABE8.8; ABE8.8-m).

[1009] Three days after transfection, genomic DNA was harvested from the hepatocytes, and assessed for base editing with next-generation sequencing of PCR amplicons generated around the target splice site.

[1010] The human TTR locus primers used for NGS analysis are listed below:

With NGS adapters:
Forward (F):
(SEQ ID NO: 1192)
TCGTCGGCAGCGTCAGATGTGTATAAGAGACAGGATAAGCAGCCTAGCTC
AGGAGA
Reverse (R):
(SEQ ID NO: 1193)
GTCTCGTGGGCTCGGAGATGTGTATAAGAGACAGGGGCCAGCCTCAGACA
CAAA
Without NGS adapters:
Forward (F):
(SEQ ID NO: 950)
GATAAGCAGCCTAGCTCAGGAGA
Reverse (R):
(SEQ ID NO: 1194)
GGGCCAGCCTCAGACACAAA

[1011] FIG. 42 depicts dose response for human gRNA GA521 in primary human hepatocytes. Percent base editing at various doses (ng/ml) total RNA was determined from NGS analysis. GA521 was the guide RNA.

[1012] Overall, GA521 showed an increase in base editing with increasing dose (ng/ml) total RNA and high and sustained editing activity of greater than 40% in human cells.

### Example 5: Transthyretin Gene Alterations

[1013] The guide RNAs listed in Table 1 were screened for use in editing the transthyretin (TTR) gene by disrupting splice sites (FIG. 29A-29C) or using a bhCas12b nuclease strategy (FIG. 30). 15 total guide RNAs were screened. The screen was performed in HEK293T cells using based editors and bhCas12b delivered as mRNA and the sgRNAs. The guide RNAs sgRNA_361 and sgRNA_362 worked well in splice site disruption (FIGS. 29A-29C) using ABE and/or BE4. Several of the gRNAs functioned well as bhCas 12b nuclease gRNAs.

[1014] Sequences for the base editors indicated in FIGS. 29A-29C and the bhCas12b endonuclease are listed below in Table 24.

TABLE 24
Base editor and nuclease sequences.

| | | SEQ | |
|---|---|---|---|
| | | ID | |
| Name | Description | NO | Sequence |
| ABE8.8 | pMRNA-trilink- | 1195 | MSEVEFSHEYWMRHALTLAKRARDEREVPVGAVLVL |
| | monoTadA- | | NNRVIGEGWNRAIGLHDPTAHAEIMALROGGLVMQN |
| | ABE8.8(TadA7. | | YRLIDATLYVTFEPCVMCAGAMIHSRIGRVVFGVRN |
| | 10+H123H+Y14 | | AKTGAAGSLMDVLHHPGMNHRVEITEGILADECAAL |
| | 7R+Q154R) | | LCRFFRMPRRVFNAQKKAQSSTDSGGSSGGSSGSET |
| | 120A bbsI | | PGTSESATPESSGGSSGGSDKKYSIGLAIGTNSVGW |
| | | | AVITDEYKVPSKKFKVLGNTDRHSIKKNLIGALLFD |
| | | | SGETAEATRLKRTARRRYTRRKNRICYLQEIFSNEM |
| | | | AKVDDSFFHRLEESFLVEEDKKHERHPIFGNIVDEV |
| | | | AYHEKYPTIYHLRKKLVDSTDKADLRLIYLALAHMI |
| | | | KFRGHFLIEGDLNPDNSDVDKLFIQLVQTYNQLFEE |
| | | | NPINASGVDAKAILSARLSKSRRLENLIAQLPGEKK |
| | | | NGLFGNLIALSLGLTPNFKSNFDLAEDAKLQLSKDT |
| | | | YDDDLDNLLAQIGDQYADLFLAAKNLSDAILLSDIL |
| | | | RVNTEITKAPLSASMIKRYDEHHQDLTLLKALVRQQ |
| | | | LPEKYKEIFFDQSKNGYAGYIDGGASQEEFYKFIKP |
| | | | ILEKMDGTEELLVKLNREDLLRKQRTFDNGSIPHQI |
| | | | HLGELHAILRRQEDFYPFLKDNREKIEKILTFRIPY |
| | | | YVGPLARGNSRFAWMTRKSEETITPWNFEEVVDKGA |
| | | | SAQSFIERMTNFDKNLPNEKVLPKHSLLYEYFTVYN |
| | | | ELTKVKYVTEGMRKPAFLSGEQKKAIVDLLFKTNRK |
| | | | VTVKQLKEDYFKKIECFDSVEISGVEDRFNASLGTY |
| | | | HDLLKIIKDKDFLDNEENEDILEDIVLTLTLFEDRE |
| | | | MIEERLKTYAHLFDDKVMKOLKRRRYTGWGRLSRKL |
| | | | INGIRDKQSGKTILDFLKSDGFANRNFMQLIHDDSL |
| | | | TFKEDIQKAQVSGQGDSLHEHIANLAGSPAIKKGIL |
| | | | QTVKVVDELVKVMGRHKPENIVIEMARENOTTQKGQ |
| | | | KNSRERMKRIEEGIKELGSQILKEHPVENTQLQNEK |
| | | | LYLYYLQNGRDMYVDQELDINRLSDYDVDHIVPQSF |
| | | | LKDDSIDNKVLTRSDKNRGKSDNVPSEEVVKKMKNY |
| | | | WRQLLNAKLITQRKFDNLTKAERGGLSELDKAGFIK |
| | | | RQLVETRQITKHVAQILDSRMNTKYDENDKLIREVK |
| | | | VITLKSKLVSDFRKDFQFYKVREINNYHHAHDAYLN |
| | | | AVVGTALIKKYPKLESEFVYGDYKVYDVRKMIAKSE |
| | | | QEIGKATAKYFFYSNIMNFFKTEITLANGEIRKRPL |
| | | | IETNGETGEIVWDKGRDFATVRKVLSMPQVNIVKKT |
| | | | EVQTGGFSKESILPKRNSDKLIARKKDWDPKKYGGF |
| | | | DSPTVAYSVLVVAKVEKGKSKKLKSVKELLGITIME |
| | | | RSSFEKNPIDFLEAKGYKEVKKDLIIKLPKYSLFEL |
| | | | ENGRKRMLASAGELQKGNELALPSKYVNFLYLASHY |
| | | | EKLKGSPEDNEQKOLFVEQHKHYLDEIIEQISEFSK |
| | | | RVILADANLDKVLSAYNKHRDKPIREQAENIIHLFT |
| | | | LTNLGAPAAFKYFDTTIDRKRYTSTKEVLDATLIHQ |
| | | | SITGLYETRIDLSQLGGDEGADKRTADGSEFESPKK |
| | | | KRKV |
| BE4 | pMRNA-BE4 | 1196 | MSSETGPVAVDPTLRRRIEPHEFEVFFDPRELRKET |
| | 120A BbsI | | CLLYEINWGGRHSIWRHTSQNTNKHVEVNFIEKFTT |
| | | | ERYFCPNTRCSITWFLSWSPCGECSRAITEFLSRYP |
| | | | HVTLFIYIARLYHHADPRNRQGLRDLISSGVTIQIM |
| | | | TEQESGYCWRNFVNYSPSNEAHWPRYPHLWVRLYVL |
| | | | ELYCIILGLPPCLNILRRKQPQLTFFTIALQSCHYQ |
| | | | RLPPHILWATGLKSGGSSGGSSGSETPGTSESATPE |
| | | | SSGGSSGGSDKKYSIGLAIGTNSVGWAVITDEYKVP |
| | | | SKKFKVLGNTDRHSIKKNLIGALLFDSGETAEATRL |
| | | | KRTARRRYTRRKNRICYLQEIFSNEMAKVDDSFFHR |
| | | | LEESFLVEEDKKHERHPIFGNIVDEVAYHEKYPTIY |
| | | | HLRKKLVDSTDKADLRLIYLALAHMIKFRGHFLIEG |
| | | | DLNPDNSDVDKLFIQLVQTYNQLFEENPINASGVDA |
| | | | KAILSARLSKSRRLENLIAQLPGEKKNGLFGNLIAL |
| | | | SLGLTPNFKSNFDLAEDAKLQLSKDTYDDDLDNLLA |
| | | | QIGDQYADLFLAAKNLSDAILLSDILRVNTEITKAP |
| | | | LSASMIKRYDEHHQDLTLLKALVROQLPEKYKEIFF |
| | | | DQSKNGYAGYIDGGASQEEFYKFIKPILEKMDGTEE |
| | | | LLVKLNREDLLRKQRTFDNGSIPHQIHLGELHAILR |
| | | | RQEDFYPFLKDNREKIEKILTFRIPYYVGPLARGNS |
| | | | RFAWMTRKSEETITPWNFEEVVDKGASAQSFIERMT |
| | | | NFDKNLPNEKVLPKHSLLYEYFTVYNELTKVKYVTE |
| | | | GMRKPAFLSGEQKKAIVDLLFKTNRKVTVKOLKEDY |
| | | | FKKIECFDSVEISGVEDRFNASLGTYHDLLKIIKDK |
| | | | DFLDNEENEDILEDIVLTLTLFEDREMIEERLKTYA |
| | | | HLFDDKVMKQLKRRRYTGWGRLSRKLINGIRDKQSG |
| | | | KTILDFLKSDGFANRNFMQLIHDDSLTFKEDIQKAQ |
| | | | VSGQGDSLHEHIANLAGSPAIKKGILQTVKVVDELV |
| | | | KVMGRHKPENIVIEMARENQTTQKGQKNSRERMKRI |
| | | | EEGIKELGSQILKEHPVENTQLQNEKLYLYYLONGR |
| | | | DMYVDQELDINRLSDYDVDHIVPQSFLKDDSIDNKV |
| | | | LTRSDKNRGKSDNVPSEEVVKKMKNYWRQLLNAKLI |
| | | | TQRKFDNLTKAERGGLSELDKAGFIKRQLVETRQIT |
| | | | KHVAQILDSRMNTKYDENDKLIREVKVITLKSKLVS |
| | | | DFRKDFQFYKVREINNYHHAHDAYLNAVVGTALIKK |
| | | | YPKLESEFVYGDYKVYDVRKMIAKSEQEIGKATAKY |
| | | | FFYSNIMNFFKTEITLANGEIRKRPLIETNGETGEI |
| | | | VWDKGRDFATVRKVLSMPQVNIVKKTEVQTGGFSKE |
| | | | SILPKRNSDKLIARKKDWDPKKYGGFDSPTVAYSVL |
| | | | VVAKVEKGKSKKLKSVKELLGITIMERSSFEKNPID |
| | | | FLEAKGYKEVKKDLIIKLPKYSLFELENGRKRMLAS |
| | | | AGELQKGNELALPSKYVNFLYLASHYEKLKGSPEDN |
| | | | EQKOLFVEQHKHYLDEIIEQISEFSKRVILADANLD |
| | | | KVLSAYNKHRDKPIREQAENIIHLFTLTNLGAPAAF |
| | | | KYFDTTIDRKRYTSTKEVLDATLIHQSITGLYETRI |
| | | | DLSQLGGDSGGSGGSGGSTNLSDIIEKETGKQLVIQ |
| | | | ESILMLPEEVEEVIGNKPESDILVHTAYDESTDENV |
| | | | MLLTSDAPEYKPWALVIQDSNGENKIKMLSGGSGGS |
| | | | GGSTNLSDIIEKETGKQLVIQESILMLPEEVEEVIG |
| | | | NKPESDILVHTAYDESTDENVMLLTSDAPEYKPWAL |
| | | | VIQDSNGENKIKMLSGGSKRTADGSEFESPKKKRKV |
| | | | E |
| ABE8.8- | pMRNA-trilink- | 1197 | MSEVEFSHEYWMRHALTLAKRARDEREVPVGAVLVL |
| VRQR | mono TadA- | | NNRVIGEGWNRAIGLHDPTAHAEIMALRQGGLVMQN |
| | ABE8.8(TadA7. | | YRLIDATLYVTFEPCVMCAGAMIHSRIGRVVFGVRN |
| | 10+H123H+Y14 | | AKTGAAGSLMDVLHHPGMNHRVEITEGILADECAAL |
| | 7R+Q154R)- | | LCRFFRMPRRVFNAQKKAQSSTDSGGSSGGSSGSET |
| | VRQR 120A | | PGTSESATPESSGGSSGGSDKKYSIGLAIGTNSVGW |
| | bbsI | | AVITDEYKVPSKKFKVLGNTDRHSIKKNLIGALLFD |
| | | | SGETAEATRLKRTARRRYTRRKNRICYLQEIFSNEM |
| | | | AKVDDSFFHRLEESFLVEEDKKHERHPIFGNIVDEV |
| | | | AYHEKYPTIYHLRKKLVDSTDKADLRLIYLALAHMI |
| | | | KFRGHFLIEGDLNPDNSDVDKLFIQLVQTYNQLFEE |
| | | | NPINASGVDAKAILSARLSKSRRLENLIAQLPGEKK |
| | | | NGLFGNLIALSLGLTPNFKSNFDLAEDAKLQLSKDT |
| | | | YDDDLDNLLAQIGDQYADLFLAAKNLSDAILLSDIL |
| | | | RVNTEITKAPLSASMIKRYDEHHQDLTLLKALVRQQ |
| | | | LPEKYKEIFFDQSKNGYAGYIDGGASQEEFYKFIKP |
| | | | ILEKMDGTEELLVKLNREDLLRKORTFDNGSIPHQI |
| | | | HLGELHAILRRQEDFYPFLKDNREKIEKILTFRIPY |
| | | | YVGPLARGNSRFAWMTRKSEETITPWNFEEVVDKGA |
| | | | SAQSFIERMTNFDKNLPNEKVLPKHSLLYEYFTVYN |
| | | | ELTKVKYVTEGMRKPAFLSGEQKKAIVDLLFKTNRK |
| | | | VTVKQLKEDYFKKIECFDSVEISGVEDRFNASLGTY |
| | | | HDLLKIIKDKDFLDNEENEDILEDIVLTLTLFEDRE |
| | | | MIEERLKTYAHLFDDKVMKOLKRRRYTGWGRLSRKL |
| | | | INGIRDKQSGKTILDFLKSDGFANRNFMQLIHDDSL |
| | | | TFKEDIQKAQVSGQGDSLHEHIANLAGSPAIKKGIL |
| | | | QTVKVVDELVKVMGRHKPENIVIEMARENOTTQKGQ |
| | | | KNSRERMKRIEEGIKELGSQILKEHPVENTQLQNEK |
| | | | LYLYYLQNGRDMYVDQELDINRLSDYDVDHIVPQSF |
| | | | LKDDSIDNKVLTRSDKNRGKSDNVPSEEVVKKMKNY |
| | | | WRQLLNAKLITQRKFDNLTKAERGGLSELDKAGFIK |
| | | | RQLVETRQITKHVAQILDSRMNTKYDENDKLIREVK |
| | | | VITLKSKLVSDFRKDFQFYKVREINNYHHAHDAYLN |
| | | | AVVGTALIKKYPKLESEFVYGDYKVYDVRKMIAKSE |
| | | | QEIGKATAKYFFYSNIMNFFKTEITLANGEIRKRPL |
| | | | IETNGETGEIVWDKGRDFATVRKVLSMPQVNIVKKT |
| | | | EVQTGGFSKESILPKRNSDKLIARKKDWDPKKYGGF |
| | | | VSPTVAYSVLVVAKVEKGKSKKLKSVKELLGITIME |
| | | | RSSFEKNPIDFLEAKGYKEVKKDLIIKLPKYSLFEL |
| | | | ENGRKRMLASARELQKGNELALPSKYVNFLYLASHY |
| | | | EKLKGSPEDNEQKOLFVEQHKHYLDEIIEQISEFSK |
| | | | RVILADANLDKVLSAYNKHRDKPIREQAENIIHLFT |
| | | | LTNLGAPAAFKYFDTTIDRKQYRSTKEVLDATLIHQ |
| | | | SITGLYETRIDLSQLGGDEGADKRTADGSEFESPKK |
| | | | KRKV |
| BE4- | pMRNA-BE4- | 1198 | MSSETGPVAVDPTLRRRIEPHEFEVFFDPRELRKET |
| VRQR | VRQR 120A | | CLLYEINWGGRHSIWRHTSQNTNKHVEVNFIEKFTT |
| | BsaI | | ERYFCPNTRCSITWFLSWSPCGECSRAITEFLSRYP |
| | | | HVTLFIYIARLYHHADPRNRQGLRDLISSGVTIQIM |
| | | | TEQESGYCWRNFVNYSPSNEAHWPRYPHLWVRLYVL |
| | | | ELYCIILGLPPCLNILRRKQPQLTFFTIALQSCHYQ |
| | | | RLPPHILWATGLKSGGSSGGSSGSETPGTSESATPE |
| | | | SSGGSSGGSDKKYSIGLAIGTNSVGWAVITDEYKVP |
| | | | SKKFKVLGNTDRHSIKKNLIGALLFDSGETAEATRL |
| | | | KRTARRRYTRRKNRICYLQEIFSNEMAKVDDSFFHR |
| | | | LEESFLVEEDKKHERHPIFGNIVDEVAYHEKYPTIY |
| | | | HLRKKLVDSTDKADLRLIYLALAHMIKFRGHFLIEG |
| | | | DLNPDNSDVDKLFIQLVQTYNQLFEENPINASGVDA |
| | | | KAILSARLSKSRRLENLIAQLPGEKKNGLFGNLIAL |
| | | | SLGLTPNFKSNFDLAEDAKLQLSKDTYDDDLDNLLA |
| | | | QIGDQYADLFLAAKNLSDAILLSDILRVNTEITKAP |
| | | | LSASMIKRYDEHHQDLTLLKALVRQQLPEKYKEIFF |
| | | | DQSKNGYAGYIDGGASQEEFYKFIKPILEKMDGTEE |
| | | | LLVKLNREDLLRKQRTFDNGSIPHQIHLGELHAILR |
| | | | RQEDFYPFLKDNREKIEKILTFRIPYYVGPLARGNS |
| | | | RFAWMTRKSEETITPWNFEEVVDKGASAQSFIERMT |
| | | | NFDKNLPNEKVLPKHSLLYEYFTVYNELTKVKYVTE |
| | | | GMRKPAFLSGEQKKAIVDLLFKTNRKVTVKOLKEDY |
| | | | FKKIECFDSVEISGVEDRFNASLGTYHDLLKIIKDK |
| | | | DFLDNEENEDILEDIVLTLTLFEDREMIEERLKTYA |
| | | | HLFDDKVMKQLKRRRYTGWGRLSRKLINGIRDKQSG |
| | | | KTILDFLKSDGFANRNFMQLIHDDSLTFKEDIQKAQ |
| | | | VSGQGDSLHEHIANLAGSPAIKKGILQTVKVVDELV |
| | | | KVMGRHKPENIVIEMARENQTTQKGQKNSRERMKRI |
| | | | EEGIKELGSQILKEHPVENTQLQNEKLYLYYLONGR |
| | | | DMYVDQELDINRLSDYDVDHIVPQSFLKDDSIDNKV |
| | | | LTRSDKNRGKSDNVPSEEVVKKMKNYWRQLLNAKLI |
| | | | TQRKFDNLTKAERGGLSELDKAGFIKRQLVETROIT |
| | | | KHVAQILDSRMNTKYDENDKLIREVKVITLKSKLVS |
| | | | DFRKDFQFYKVREINNYHHAHDAYLNAVVGTALIKK |
| | | | YPKLESEFVYGDYKVYDVRKMIAKSEQEIGKATAKY |
| | | | FFYSNIMNFFKTEITLANGEIRKRPLIETNGETGEI |
| | | | VWDKGRDFATVRKVLSMPQVNIVKKTEVQTGGFSKE |
| | | | SILPKRNSDKLIARKKDWDPKKYGGFVSPTVAYSVL |
| | | | VVAKVEKGKSKKLKSVKELLGITIMERSSFEKNPID |
| | | | FLEAKGYKEVKKDLIIKLPKYSLFELENGRKRMLAS |
| | | | ARELQKGNELALPSKYVNFLYLASHYEKLKGSPEDN |
| | | | EQKQLFVEQHKHYLDEIIEQISEFSKRVILADANLD |
| | | | KVLSAYNKHRDKPIREQAENIIHLFTLTNLGAPAAF |
| | | | KYFDTTIDRKQYRSTKEVLDATLIHQSITGLYETRI |
| | | | DLSQLGGDSGGSGGSGGSTNLSDIIEKETGKQLVIQ |
| | | | ESILMLPEEVEEVIGNKPESDILVHTAYDESTDENV |
| | | | MLLTSDAPEYKPWALVIQDSNGENKIKMLSGGSGGS |
| | | | GGSTNLSDIIEKETGKQLVIQESILMLPEEVEEVIG |
| | | | NKPESDILVHTAYDESTDENVMLLTSDAPEYKPWAL |
| | | | VIQDSNGENKIKMLSGGSKRTADGSEFESPKKKRKV |
| | | | E |
| saABE8.8 | pMRNA-trilink- | 1199 | MSEVEFSHEYWMRHALTLAKRARDEREVPVGAVLVL |
| | monoTadA- | | NNRVIGEGWNRAIGLHDPTAHAEIMALRQGGLVMQN |
| | saABE8.8 | | YRLIDATLYVTFEPCVMCAGAMIHSRIGRVVFGVRN |
| | (TadA7.10+H12 | | AKTGAAGSLMDVLHHPGMNHRVEITEGILADECAAL |
| | 3H+Y147R+Q1 | | LCRFFRMPRRVFNAQKKAQSSTDSGGSSGGSSGSET |
| | 54R) 120A bbsI | | PGTSESATPESSGGSSGGSKRNYILGLAIGITSVGY |
| | | | GIIDYETRDVIDAGVRLFKEANVENNEGRRSKRGAR |
| | | | RLKRRRRHRIQRVKKLLFDYNLLTDHSELSGINPYE |
| | | | ARVKGLSQKLSEEEFSAALLHLAKRRGVHNVNEVEE |
| | | | DTGNELSTKEQISRNSKALEEKYVAELQLERLKKDG |
| | | | EVRGSINRFKTSDYVKEAKQLLKVQKAYHQLDQSFI |
| | | | DTYIDLLETRRTYYEGPGEGSPFGWKDIKEWYEMLM |
| | | | GHCTYFPEELRSVKYAYNADLYNALNDLNNLVITRD |
| | | | ENEKLEYYEKFQIIENVFKQKKKPTLKQIAKEILVN |
| | | | EEDIKGYRVTSTGKPEFTNLKVYHDIKDITARKEII |
| | | | ENAELLDQIAKILTIYQSSEDIQEELTNLNSELTQE |
| | | | EIEQISNLKGYTGTHNLSLKAINLILDELWHTNDNQ |
| | | | IAIFNRLKLVPKKVDLSQQKEIPTTLVDDFILSPVV |
| | | | KRSFIQSIKVINAIIKKYGLPNDIIIELAREKNSKD |
| | | | AQKMINEMQKRNRQTNERIEEIIRTTGKENAKYLIE |
| | | | KIKLHDMQEGKCLYSLEAIPLEDLLNNPFNYEVDHI |
| | | | IPRSVSFDNSFNNKVLVKQEENSKKGNRTPFQYLSS |
| | | | SDSKISYETFKKHILNLAKGKGRISKTKKEYLLEER |
| | | | DINRFSVQKDFINRNLVDTRYATRGLMNLLRSYFRV |
| | | | NNLDVKVKSINGGFTSFLRRKWKFKKERNKGYKHHA |
| | | | EDALIIANADFIFKEWKKLDKAKKVMENQMFEEKQA |
| | | | ESMPEIETEQEYKEIFITPHQIKHIKDFKDYKYSHR |
| | | | VDKKPNRELINDTLYSTRKDDKGNTLIVNNLNGLYD |
| | | | KDNDKLKKLINKSPEKLLMYHHDPQTYQKLKLIMEQ |
| | | | YGDEKNPLYKYYEETGNYLTKYSKKDNGPVIKKIKY |
| | | | YGNKLNAHLDITDDYPNSRNKVVKLSLKPYRFDVYL |
| | | | DNGVYKFVTVKNLDVIKKENYYEVNSKCYEEAKKLK |
| | | | KISNQAEFIASFYNNDLIKINGELYRVIGVNNDLLN |
| | | | RIEVNMIDITYREYLENMNDKRPPRIIKTIASKTQS |
| | | | IKKYSTDILGNLYEVKSKKHPQIIKKGEGADKRTAD |
| | | | GSEFESPKKKRKV |
| saBE4 | pMRNA-saBE4 | 1200 | MSSETGPVAVDPTLRRRIEPHEFEVFFDPRELRKET |
| | 120A BbsI | | CLLYEINWGGRHSIWRHTSQNTNKHVEVNFIEKFTT |
| | | | ERYFCPNTRCSITWFLSWSPCGECSRAITEFLSRYP |
| | | | HVTLFIYIARLYHHADPRNRQGLRDLISSGVTIQIM |
| | | | TEQESGYCWRNFVNYSPSNEAHWPRYPHLWVRLYVL |
| | | | ELYCIILGLPPCLNILRRKQPQLTFFTIALQSCHYQ |
| | | | RLPPHILWATGLKSGGSSGGSSGSETPGTSESATPE |
| | | | SSGGSSGGSGKRNYILGLAIGITSVGYGIIDYETRD |
| | | | VIDAGVRLFKEANVENNEGRRSKRGARRLKRRRRHR |
| | | | IQRVKKLLFDYNLLTDHSELSGINPYEARVKGLSQK |
| | | | LSEEEFSAALLHLAKRRGVHNVNEVEEDTGNELSTK |
| | | | EQISRNSKALEEKYVAELQLERLKKDGEVRGSINRF |
| | | | KTSDYVKEAKQLLKVQKAYHQLDQSFIDTYIDLLET |
| | | | RRTYYEGPGEGSPFGWKDIKEWYEMLMGHCTYFPEE |
| | | | LRSVKYAYNADLYNALNDLNNLVITRDENEKLEYYE |
| | | | KFQIIENVFKQKKKPTLKQIAKEILVNEEDIKGYRV |
| | | | TSTGKPEFTNLKVYHDIKDITARKEIIENAELLDQI |
| | | | AKILTIYQSSEDIQEELTNLNSELTQEEIEQISNLK |
| | | | GYTGTHNLSLKAINLILDELWHTNDNQIAIFNRLKL |
| | | | VPKKVDLSQQKEIPTTLVDDFILSPVVKRSFIQSIK |
| | | | VINAIIKKYGLPNDIIIELAREKNSKDAQKMINEMQ |
| | | | KRNRQTNERIEEIIRTTGKENAKYLIEKIKLHDMQE |
| | | | GKCLYSLEAIPLEDLLNNPFNYEVDHIIPRSVSFDN |
| | | | SFNNKVLVKQEENSKKGNRTPFQYLSSSDSKISYET |
| | | | FKKHILNLAKGKGRISKTKKEYLLEERDINRFSVQK |
| | | | DFINRNLVDTRYATRGLMNLLRSYFRVNNLDVKVKS |
| | | | INGGFTSFLRRKWKFKKERNKGYKHHAEDALIIANA |
| | | | DFIFKEWKKLDKAKKVMENQMFEEKQAESMPEIETE |
| | | | QEYKEIFITPHQIKHIKDFKDYKYSHRVDKKPNREL |
| | | | INDTLYSTRKDDKGNTLIVNNLNGLYDKDNDKLKKL |
| | | | INKSPEKLLMYHHDPQTYQKLKLIMEQYGDEKNPLY |
| | | | KYYEETGNYLTKYSKKDNGPVIKKIKYYGNKLNAHL |
| | | | DITDDYPNSRNKVVKLSLKPYRFDVYLDNGVYKFVT |
| | | | VKNLDVIKKENYYEVNSKCYEEAKKLKKISNQAEFI |
| | | | ASFYNNDLIKINGELYRVIGVNNDLLNRIEVNMIDI |
| | | | TYREYLENMNDKRPPRIIKTIASKTQSIKKYSTDIL |
| | | | GNLYEVKSKKHPQIIKKGGSPKKKRKVSSDYKDHDG |
| | | | DYKDHDIDYKDDDDKSGGSGGSGGSTNLSDIIEKET |
| | | | GKQLVIQESILMLPEEVEEVIGNKPESDILVHTAYD |
| | | | ESTDENVMLLTSDAPEYKPWALVIQDSNGENKIKML |
| | | | SGGSGGSGGSTNLSDIIEKETGKQLVIQESILMLPE |
| | | | EVEEVIGNKPESDILVHTAYDESTDENVMLLTSDAP |
| | | | EYKPWALVIQDSNGENKIKMLSGGSKRTADGSEFES |
| | | | PKKKRKVE |
| saBE4- | pMRNA-saBE4- | 1201 | MSSETGPVAVDPTLRRRIEPHEFEVFFDPRELRKET |
| KKH | KKH 120A BbsI | | CLLYEINWGGRHSIWRHTSQNTNKHVEVNFIEKFTT |
| | | | ERYFCPNTRCSITWFLSWSPCGECSRAITEFLSRYP |
| | | | HVTLFIYIARLYHHADPRNRQGLRDLISSGVTIQIM |
| | | | TEQESGYCWRNFVNYSPSNEAHWPRYPHLWVRLYVL |
| | | | ELYCIILGLPPCLNILRRKQPQLTFFTIALQSCHYQ |
| | | | RLPPHILWATGLKSGGSSGGSSGSETPGTSESATPE |
| | | | SSGGSSGGSGKRNYILGLAIGITSVGYGIIDYETRD |
| | | | VIDAGVRLFKEANVENNEGRRSKRGARRLKRRRRHR |
| | | | IQRVKKLLFDYNLLTDHSELSGINPYEARVKGLSQK |
| | | | LSEEEFSAALLHLAKRRGVHNVNEVEEDTGNELSTK |
| | | | EQISRNSKALEEKYVAELQLERLKKDGEVRGSINRF |
| | | | KTSDYVKEAKQLLKVQKAYHQLDQSFIDTYIDLLET |
| | | | RRTYYEGPGEGSPFGWKDIKEWYEMLMGHCTYFPEE |
| | | | LRSVKYAYNADLYNALNDLNNLVITRDENEKLEYYE |
| | | | KFQIIENVFKQKKKPTLKQIAKEILVNEEDIKGYRV |
| | | | TSTGKPEFTNLKVYHDIKDITARKEIIENAELLDQI |
| | | | AKILTIYQSSEDIQEELTNLNSELTQEEIEQISNLK |
| | | | GYTGTHNLSLKAINLILDELWHTNDNQIAIFNRLKL |
| | | | VPKKVDLSQQKEIPTTLVDDFILSPVVKRSFIQSIK |
| | | | VINAIIKKYGLPNDIIIELAREKNSKDAQKMINEMQ |
| | | | KRNRQTNERIEEIIRTTGKENAKYLIEKIKLHDMQE |
| | | | GKCLYSLEAIPLEDLLNNPFNYEVDHIIPRSVSFDN |
| | | | SFNNKVLVKQEENSKKGNRTPFQYLSSSDSKISYET |
| | | | FKKHILNLAKGKGRISKTKKEYLLEERDINRFSVQK |
| | | | DFINRNLVDTRYATRGLMNLLRSYFRVNNLDVKVKS |
| | | | INGGFTSFLRRKWKFKKERNKGYKHHAEDALIIANA |
| | | | DFIFKEWKKLDKAKKVMENQMFEEKQAESMPEIETE |
| | | | QEYKEIFITPHQIKHIKDFKDYKYSHRVDKKPNRKL |
| | | | INDTLYSTRKDDKGNTLIVNNLNGLYDKDNDKLKKL |
| | | | INKSPEKLLMYHHDPQTYQKLKLIMEQYGDEKNPLY |
| | | | KYYEETGNYLTKYSKKDNGPVIKKIKYYGNKLNAHL |
| | | | DITDDYPNSRNKVVKLSLKPYRFDVYLDNGVYKFVT |
| | | | VKNLDVIKKENYYEVNSKCYEEAKKLKKISNQAEFI |
| | | | ASFYKNDLIKINGELYRVIGVNNDLLNRIEVNMIDI |
| | | | TYREYLENMNDKRPPHIIKTIASKTQSIKKYSTDIL |
| | | | GNLYEVKSKKHPQIIKKGGSPKKKRKVSSDYKDHDG |
| | | | DYKDHDIDYKDDDDKSGGSGGSGGSTNLSDIIEKET |
| | | | GKQLVIQESILMLPEEVEEVIGNKPESDILVHTAYD |
| | | | ESTDENVMLLTSDAPEYKPWALVIQDSNGENKIKML |
| | | | SGGSGGSGGSTNLSDIIEKETGKQLVIQESILMLPE |
| | | | EVEEVIGNKPESDILVHTAYDESTDENVMLLTSDAP |
| | | | EYKPWALVIQDSNGENKIKMLSGGSKRTADGSEFES |
| | | | PKKKRKVE |
| ABE- | pBZ517 | 1202 | MSEVEFSHEYWMRHALTLAKRARDEREVPVGAVLVL |
| bhCas12b | pCV021_ABE8. | | NNRVIGEGWNRAIGLHDPTAHAEIMALRQGGLVMQN |
| | 13m- | | YRLYDATLYVTFEPCVMCAGAMIHSRIGRVVFGVRN |
| | dBhCas12b_(D9 | | AKTGAAGSLMDVLHHPGMNHRVEITEGILADECAAL |
| | 52A, S893R,_K | | LCRFFRMPRRVFNAQKKAQSSTDGSSGSETPGTSES |
| | 846R, E837G) | | ATPESSGAPKKKRKVGIHGVPAAATRSFILKIEPNE |
| | | | EVKKGLWKTHEVLNHGIAYYMNILKLIRQEAIYEHH |
| | | | EQDPKNPKKVSKAEIQAELWDFVLKMQKCNSFTHEV |
| | | | DKDEVFNILRELYEELVPSSVEKKGEANQLSNKFLY |
| | | | PLVDPNSQSGKGTASSGRKPRWYNIKIAGDPSWEEE |
| | | | KKKWEEDKKKDPLAKILGKLAEYGLIPLFIPYTDSN |
| | | | EPIVKEIKWMEKSRNQSVRRLDKDMFIQALERFLSW |
| | | | ESWNLKVKEEYEKVEKEYKTLEERIKEDIQALKALE |
| | | | QYEKERQEQLLRDTLNTNEYRLSKRGLRGWREIIQK |
| | | | WLKMDENEPSEKYLEVFKDYQRKHPREAGDYSVYEF |
| | | | LSKKENHFIWRNHPEYPYLYATFCEIDKKKKDAKQQ |
| | | | ATFTLADPINHPLWVRFEERSGSNLNKYRILTEQLH |
| | | | TEKLKKKLTVQLDRLIYPTESGGWEEKGKVDIVLLP |
| | | | SRQFYNQIFLDIEEKGKHAFTYKDESIKFPLKGTLG |
| | | | GARVQFDRDHLRRYPHKVESGNVGRIYFNMTVNIEP |
| | | | TESPVSKSLKIHRDDFPKVVNFKPKELTEWIKDSKG |
| | | | KKLKSGIESLEIGLRVMSIALGQRQAAAASIFEVVD |
| | | | QKPDIEGKLFFPIKGTELYAVHRASFNIKLPGETLV |
| | | | KSREVLRKAREDNLKLMNQKLNFLRNVLHFQQFEDI |
| | | | TEREKRVTKWISRQENSDVPLVYQDELIQIRELMYK |
| | | | PYKDWVAFLKQLHKRLEVEIGKEVKHWRKSLSDGRK |
| | | | GLYGISLKNIDEIDRTRKFLLRWSLRPTEPGEVRRL |
| | | | EPGQRFAIDQLNHLNALKEDRLKKMANTIIMHALGY |
| | | | CYDVRKKKWQAKNPACQIILFEDLSNYNPYKERSRF |
| | | | ENSRLMKWSRREIPRQVALQGEIYGLQVGEVGAQFS |
| | | | SRFHAKTGSPGIRCRVVTKEKLQDNRFFKNLQREGR |
| | | | LTLDKIAVLKEGDLYPDKGGEKFISLSKDRKCVTTH |
| | | | ADINAAQNLQKRFWTRTHGFYKVYCKAYQVDGQTVY |
| | | | IPESKDQKQKIIEEFGEGYFILKDGVYEWVNAGKLK |
| | | | IKKGSSKQSSSELVDSDILKDSFDLASELKGEKLML |
| | | | YRDPSGNVFPSDKWMAAGVFFGKLERILISKLTNQY |
| | | | SISTIEDDSSKQSMKRPAATKKAGQAKKKK |
| bhCas12b | Cas12b v4 | 1203 | MAPKKKRKVGIHGVPAAATRSFILKIEPNEEVKKGL |
| v4 | | | WKTHEVLNHGIAYYMNILKLIRQEAIYEHHEQDPKN |
| | | | PKKVSKAEIQAELWDFVLKMQKCNSFTHEVDKDEVF |
| | | | NILRELYEELVPSSVEKKGEANQLSNKFLYPLVDPN |
| | | | SQSGKGTASSGRKPRWYNLKIAGDPSWEEEKKKWEE |
| | | | DKKKDPLAKILGKLAEYGLIPLFIPYTDSNEPIVKE |
| | | | IKWMEKSRNQSVRRLDKDMFIQALERFLSWESWNLK |
| | | | VKEEYEKVEKEYKTLEERIKEDIQALKALEQYEKER |
| | | | QEQLLRDTLNTNEYRLSKRGLRGWREIIQKWLKMDE |
| | | | NEPSEKYLEVFKDYQRKHPREAGDYSVYEFLSKKEN |
| | | | HFIWRNHPEYPYLYATFCEIDKKKKDAKQQATFTLA |
| | | | DPINHPLWVRFEERSGSNLNKYRILTEQLHTEKLKK |
| | | | KLTVQLDRLIYPTESGGWEEKGKVDIVLLPSRQFYN |
| | | | QIFLDIEEKGKHAFTYKDESIKFPLKGTLGGARVQF |
| | | | DRDHLRRYPHKVESGNVGRIYFNMTVNIEPTESPVS |
| | | | KSLKIHRDDFPKVVNFKPKELTEWIKDSKGKKLKSG |
| | | | IESLEIGLRVMSIDLGQRQAAAASIFEVVDQKPDIE |
| | | | GKLFFPIKGTELYAVHRASFNIKLPGETLVKSREVL |
| | | | RKAREDNLKLMNQKLNFLRNVLHFQQFEDITEREKR |
| | | | VTKWISRQENSDVPLVYQDELIQIRELMYKPYKDWV |
| | | | AFLKQLHKRLEVEIGKEVKHWRKSLSDGRKGLYGIS |
| | | | LKNIDEIDRTRKFLLRWSLRPTEPGEVRRLEPGQRF |
| | | | AIDQLNHLNALKEDRLKKMANTIIMHALGYCYDVRK |
| | | | KKWQAKNPACQIILFEDLSNYNPYGERSRFENSRLM |
| | | | KWSRREIPRQVALQGEIYGLQVGEVGAQFSSRFHAK |
| | | | TGSPGIRCRVVTKEKLQDNRFFKNLQREGRLTLDKI |
| | | | AVLKEGDLYPDKGGEKFISLSKDRKCVTTHADINAA |
| | | | QNLQKRFWTRTHGFYKVYCKAYQVDGQTVYIPESKD |
| | | | QKQKIIEEFGEGYFILKDGVYEWVNAGKLKIKKGSS |
| | | | KQSSSELVDSDILKDSFDLASELKGEKLMLYRDPSG |
| | | | NVFPSDKWMAAGVFFGKLERILISKLTNQYSISTIE |
| | | | DDSSKQSMSGGSKRTADGSEFESPKKKRKVE |

### Example 6: Confirmation of Loss of Transthyretin (TTR) Expression in Hepatocytes

[1015] The guide RNAs identified in Example 1 as working well in splice site disruption using ABE and/or BE4, or as working well with bhCas12b are used to edit transthyretin (TTR) in hepatocytes to result in loss or reduction in TTR expression. Standard methods for culturing hepatocytes are used (see, e.g., Shulman and Nahmias, “Long-term and coculture of primary rate and human hepatocytes”, Methods Mol. Biol., 945:287-302 (2013); and Castell J., Gómez-Lechón M. (2009) Liver Cell Culture Techniques. In: Dhawan A., Hughes R. (eds) Hepatocyte Transplantation. Methods in Molecular Biology, vol 481. Humana Press, Totowa, NJ. doi: 10.1007/978-1-59745-201-4_4). For gene editing, the base editors and bhCas12b are delivered to the cells as mRNA in combination with sgRNA using lipid nanoparticles. Following gene editing, transthyretin (TTR) expression in the cells is confirmed as reduced or eliminated. Reduction or elimination of expression is confirmed using standard techniques in molecular biology (e.g., Real-Time Quantitative Reverse Transcription PCR).

### Example 7: Direct Correction of the Transthyretin (TTR) V122I Mutation

[1016] The mutation V1221 in the mature transthyretin (TTR) polypeptide is the African American population founder mutation. The mutation is a major cause of cardiovascular mortality (i.e., cardiac amyloidosis) for the African American population. About 3.9% of African Americans have the V122I mutation. The V122I mutation can be edited using ABE. Thus, ABE is used to directly correct the V122I mutation in cells.

[1017] ABE mRNA and sgRNA are delivered to a cell (e.g., a hepatocyte or a HEK293T cell) encoding a transthyretin (TTR) polypeptide having the V122I mutation. ABE mRNA encoding the base editors indicated in Table 25 below are administered in combination with sgRNAs comprising the indicated spacer sequences. The transthyretin (TTR) gene in the cell is successfully edited to no longer encode the pathogenic V122I mutation and to encode a non-pathogenic version of transthyretin (e.g., transthyretin with a valine at position 122).

TABLE 25
Base editor and nuclease sequences. One of skill in the art will understand
that some of the target site sequences correspond to a reverse-complement to the above-
provided transthyretin polynucleotide sequence; i.e., the target sequences may
correspond to either strand of a dsDNA molecule encoding a transthyretin
polynucleotide.

| BASE | | | | | TARGET |
|---|---|---|---|---|---|
| EDITOR | SGRNA | SPACER SEQUENCE | PAM | TARGET SEQUENCE | BASE |
| SPCAS9- | SGRNA_ | GGCUAUCGUCACCAAUC | AGG | GGCTATCGTCACCAATC | 5A |
| ABE | 375 | CCA (SEQ ID NO: 637) | | CCA (SEQ ID NO: 651) | |
| SPCAS9- | SGRNA_ | GCUAUCGUCACCAAUCC | GGA | GCTATCGTCACCAATCC | 4A |
| VRQR- | 376 | CAA (SEQ ID NO: 638) | | CAA (SEQ ID NO: 652) | |
| ABE | | | | | |
| SACAS9- | SGRNA_ | GGCUAUCGUCACCAAUC | AGGAA | GGCTATCGTCACCAATC | 5A |
| ABE | 377 | CCA (SEQ ID NO: 637) | T | CCA (SEQ ID NO: 651) | |

[1018] In embodiments, the altered amino acid is in a splice site or start codon as illustrated in the following sequences. Alterations in splice site disrupt expression of the encoded TTR polypeptide. A description of the respective target for each of the following sequences is indicated in parentheses:

4A of the nucleotide sequence
(SEQ ID NO: 469)
TATAGGAAAACCAGTGAGTC (splice sites);
6A of the nucleotide sequence
(SEQ ID NO: 470)
TACTCACCTCTGCATGCTCA (splice sites);
5A of the nucleotide sequence
(SEQ ID NO: 639)
ACTCACCTCTGCATGCTCAT (splice sites);
7A of the nucleotide sequence
(SEQ ID NO: 641)
ATACTCACCTCTGCATGCTCA (splice sites);
6A of the nucleotide sequence
(SEQ ID NO: 643)
TTGGCAGGATGGCTTCTCATCG (splice sites);
9A of the sequence
(SEQ ID NO: 643)
TTGGCAGGATGGCTTCTCATCG (start codon);
5A of the sequence
(SEQ ID NO: 651)
GGCTATCGTCACCAATCCCA (correction of pathogenic
mutation);
4A of the sequence
(SEQ ID NO: 652)
GCTATCGTCACCAATCCCAA (correction of pathogenic
mutation);
7C of the nucleotide sequence
(SEQ ID NO: 470)
TACTCACCTCTGCATGCTCA (splice sites);
6C of the nucleotide sequence
(SEQ ID NO: 639)
ACTCACCTCTGCATGCTCAT (splice sites);
7C of the nucleotide sequence
(SEQ ID NO: 640)
TACCACCTATGAGAGAAGAC (splice sites);
8C of the nucleotide sequence
(SEQ ID NO: 641)
ATACTCACCTCTGCATGCTCA (splice sites);
or
11C of the nucleotide sequence
(SEQ ID NO: 642)
ACTGGTTTTCCTATAAGGTGT (splice sites).

### Example 8: Transthyretin (TTR) Guide Screening and Functional Knockdown Assessment in Primary Hepatocytes

[1019] Experiments were undertaken to determine the efficacy of the base editor systems developed in the above Examples in editing human or primate primary hepatocytes. As described above, fifteen guide RNAs were designed to knockdown transthyretin (TTR) protein expression in HEK293T cells. These guides used either a base editing strategy for splice site disruption or a nuclease-based bhCas 12b strategy. A base editing strategy was initially prioritized. Base editing guides were used with either an ABE (adenosine base editor) or CBE (cytidine base editor) for splice site disruption, and a subset of guides was suitable for use with both an ABE and a CBE. Six guide editor combinations exhibited good editing efficiency in HEK293T cells (FIGS. 29A-29C): ABE8.8_sgRNA_361; ABE8.8_sgRNA_362; BE4_sgRNA_362; ABE8.8-VRQR_sgRNA 363; BE4-VRQR_sgRNA_363; and BE4-KKH_sgRNA_366. Experiments were undertaken to evaluate these four guides (sgRNAs 361, 362, 363, 366; sequences are listed in Table 1) in primary hepatocytes (both human and Macaca fascicularis) to assess editing efficiency in primary cells and the capacity for functional knockdown of TTR protein expression.

### Screening Hek293T-Validated TTR Knockdown Guides in PXB-Cell Primary Human Hepatocytes

[1020] Editor mRNA sgRNA combinations (i.e. base editor systems) were transfected in triplicate in human hepatocytes extracted from humanized mouse livers (PXB-cells, PhoenixBio) following a 3-day cell incubation. In addition to the 6 guide-editor pairs of interest (ABE8.8_sgRNA_361; ABE8.8_sgRNA_362; BE4_sgRNA_362; ABE8.8-VRQR_sgRNA_363; BE4-VRQR_sgRNA_363; and BE4-KKH_sgRNA_366), two positive control guide-editor pairs were also transfected. These positive controls included ABE8.8_sgRNA_088, which conained the spacer sequence CAGGAUCCGCACAGACUCCA

[1021] (SEQ ID NO: 1204) and is known to be effective at editing sites outside of the TTR gene, and Cas9_gRNA991 (Gillmore, J. D. et al. “CRISPR-Cas9 In Vivo Gene Editing for Transthyretin Amyloidosis,” New Engl J Med 385, 493-502 (2021)), which contained the spacer sequence AAAGGCUGCUGAUGACACCU (SEQ ID NO: 1205) corresponding to the target sequence AAAGGCTGCTGATGACACCT (SEQ ID NO: 1206). The guide gRNA991 is known to be effective for use in inducing functional TTR knockdown in hepatocytes. An untreated condition was also included as a negative control. To assess functional TTR knockdown, cell supernatants were collected and stored at −80° C. Collections were performed prior to transfection (3-day incubation), as well as 4—, 7—, 10—, and 13-days post-transfection. An additional media change was performed 1 day post-transfection, but the supernatant was discarded. Genomic DNA was harvested from cells 13 days post-transfection and editing efficiency was assessed by Next Generation Sequencing (NGS). A human TTR ELISA assay was used to assess TTR protein concentration in cell supernatants pre-transfection, as well as 7-days and 13-days post-transfection.

[1022] Pre-transfection, no significant difference in TTR concentration was observed between samples (FIG. 31). By 7-days post-transfection, a roughly 50% reduction in TTR levels was observed for ABE8.8_sgRNA_361 and ABE8.8_sgRNA_362 as compared to the control ABE8.8_sgRNA_088, which did not edit within the TTR gene (FIG. 32). This reduction was comparable to the positive control Cas9_gRNA991 (FIG. 32). Similar trends were observed 13-days post-transfection (FIG. 33). Editing efficiencies for ABE8.8_sgRNA_361 and ABE8.8_sgRNA_362 were both high, at approximately 60% (FIGS. 30 and 33). This was comparable to the controls ABE8.8_sgRNA_088 and Cas9_gRNA991 (FIGS. 32 and 33). TTR protein knockdown was positively correlated with editing rates across samples (FIGS. 32 and 33).

Assessing Editing Performance and Functional Knockdown Generation for ABE8.8_sgRNA361 and ABE8.8_sgRNA362 in Primary Cyno Hepatocytes

[1023] ABE8.8_sgRNA_361 and ABE8.8_sgRNA_362, both of which exhibited high target base-editing and functional TTR protein knockdown in PXB-cells, were transfected in triplicate in primary cyno (Macaca fascicularis) hepatocyte co-cultures. ABE8.8_sgRNA_088 was transfected as a positive control, and an untreated condition was included as a negative control, both in triplicate. To assess functional TTR knockdown, cell supernatants were collected and stored at −80° C. Collections were performed prior to transfection (3-day incubation), as well as 4—, 7—, 10—, and 13-days post-transfection. An additional media change was performed 1 day post-transfection, but the supernatant was discarded. Genomic DNA was harvested from cells 13 days post-transfection and editing efficiency was assessed by Next Generation Sequencing (NGS). A modified TTR ELISA assay was used to assess cyno TTR protein concentration in cell supernatants pre-transfection, as well as 7-days and 13-days post-transfection.

[1024] Pre-transfection, no significant difference in cyno TTR concentration was observed between samples (FIG. 34). By 7-days post-transfection, roughly 60-70% reductions in cyno TTR levels were observed for ABE8.8_sgRNA_361 and ABE8.8_sgRNA_362 as compared to ABE8.8_sgRNA_088, which did not edit within the TTR gene (FIG. 35). Similar trends were observed 13-days post-transfection (FIG. 36). Editing efficiencies for ABE8.8_sgRNA_361 and ABE8.8_sgRNA_362 were both high, at approximately 70% (FIGS. 35 and 36). This was comparable to the ABE8.8_sgRNA_088 positive control (FIGS. 35 and 36).

[1025] The following materials and methods were employed in this Example.

### Pxb-Cell Maintenance

[1026] One 24-well plate of PXB-cell hepatocytes was ordered from PhoenixBio. After receipt of cells, media was changed twice with pre-warmed dHCGM media (PhoenixBio)+10% Fetal Bovine Serum (Thermo Fisher, A³¹⁶⁰⁴⁰¹). Cells were then incubated according to the manufacturer's instructions, changing the media every 3 days. An extra media change was performed the day following transfection, after which a 3-day media change schedule was resumed. For all media changes other than the two initial changes and the day following transfection (pre-transfection and 4, 7, 10, and 13 days post-transfection), media was collected, distributed across multiple 96-well plates, and stored at −80° C.

### Primary Cyno Hepatocyte (PCH) Co-Culture Generation and Maintenance

[1027] A frozen vial of primary cyno hepatocytes (IVAL, A⁷⁵²⁴⁵, Lot #10286011) was thawed and mixed with 50 mL pre-warmed CHRM medium (Invitrogen, CM7000). Tube was centrifuged at 100×g for 10 minutes at room temperature. CHRM media was discarded and cell pellet was resuspended in 4 mL INVITROGRO CP Medium (Bio IVT, Z990003)+2.2% Torpedo Antibiotic Mix (Bio IVT, Z99000). Cells were counted using a Neubauer Improved hemocytometer (SKC, Inc., DHCN015) and 350,000 cells/well were plated in a 24-well BioCoat Rat Collagen I plate (Corning, 354408). There was a sufficient number of cells for 18 wells. Co-cultures were generated 5 hours after plating through the addition of 20,000 3T3-J2 cells (Stem Cell Technologies, 100-0353) in fresh CP+Torpedo media to each well. Following a media change the next day, cells were incubated according to the manufacturer's instructions, changing CP+Torpedo media every 3 days. An extra media change was performed the day following transfection, after which a 3-day media change schedule was resumed.

### Cell Transfection

[1028] PXB-cells were transfected 3 days following their receipt. Prior to transfection, a media change was performed for all wells. Spent media was aliquoted across multiple 96 well plates and stored at −80° C. For each condition, 200 ng sgRNA (Agilent and Synthego) and 600 ng editor mRNA (produced at Beam) were diluted to 25 μl with OPTIMEM (Thermo Fisher, 31985062) in a 96-well plate. Separately, the transfection reagent lipofectamine MessengerMAX Reagent (Thermo Fisher, LMRNA015) at 1.5X the total volume of RNA was diluted in the reduced-serum medium OPTIMEM to 25 μl for each condition, mixed thoroughly, and incubated at room temperature for 10 minutes. MessengerMAX solutions were then combined with the corresponding sgRNA+editor solution and thoroughly mixed. Following a 5-minute incubation at room temperature, the lipid encapsulated mRNA+sgRNA mixes were added dropwise onto the PXB-cells. Media was changed and spent media was discarded <16 hours following transfection.

[1029] PCH samples were transfected 4 days following the addition of 3T3-J2 feeder cells. Prior to transfection, a media change was performed for all wells. The same transfection protocol as that used for PXB-cells was used for PCH.

### Next Generation DNA Sequencing (NGS)

[1030] Following media collection, genomic DNA was isolated from each PXB-cell well 13-days post-transfection according to the following protocol. 200 μl of QuickExtract DNA Extraction Solution (Lucigen, QE09050) was added to each well. Cells were incubated for 5 minutes at 37° C., after which the cells were manually dislodged from the bottom of each well by pipetting. The cells were incubated again for 5 minutes at 37° C., after which the buffer-cell mixture was thoroughly mixed, and 150 μl was transferred to a 96-well plate. The 96-well plate was incubated at 65° C. for 15 mins and then at 98° C. for 10 mins.

[1031] PCR was performed using Phusion U Green Multiplex PCR Master Mix (Fisher Scientific, F564L) and region-specific primers. A second round of PCR was then performed on the first round PCR products to add barcoded Illumina adaptor sequences to each sample. Second round PCR products were purified using SPRIselect beads (Thermo Fisher Scientific, B23317) at a 1:1 bead to PCR ratio. The combined library concentration was quantified using a Qubit 1X dsDNA HS Assay Kit (Thermo Fisher Scientific, Q33231), and the library was sequenced using a Miseq Reagent Micro Kit v2 (300-cycles) (Illumina, MS-103-1002). Reads were aligned to appropriate reference sequences and editing efficiency was assessed at the appropriate sites.

[1032] Genomic DNA isolation, NGS, and analysis were performed as above for PCH. The library was sequenced using a Miseq Reagent Nano Kit v2 (300-cycles) (Illumina, MS-103-1001).

### Ttr Protein Quantification

[1033] A human prealbumin (TTR) ELISA kit (Abcam, ab231920) was used to measure TTR protein levels in PXB-cell supernatants at various timepoints pre- and post-transfection. PXB-cell supernatants were thawed at room temperature and centrifuged at 2000×g for 10 minutes at 4° C. Supernatants were then diluted 1:1000 in provided Sample Diluent NS buffer prior to loading on the ELISA plate. The ELISA assay was then performed according to manufacturer's instructions. Samples were allowed to develop for 18 minutes in Development solution prior to addition of Stop solution. Absorbance was read at 450 nm using an Infinite M Plex plate reader (Tecan).

[1034] For the detection of cyno (Macaca fascicularis) TTR protein in primary cyno hepatocyte co-culture supernatants, known concentrations of purified cyno TTR protein (Abcam, ab239566) were used to assess cross reactivity of the human TTR ELISA kit (Abcam, ab231920). Through this approach, it was determined that the kit was approximately 4% cross-reactive with cyno TTR protein. Purified cyno TTR protein was then used to generate a new set of standards (20 ng-0.3125 ng for standards 1-7) capable of accurately measuring cyno TTR protein levels. The assay was otherwise performed identically to manufacturer's instructions. Supernatants were diluted 1:1000 and were developed for 17 minutes in Development solution prior to addition of Stop solution.

### Example 9: Transthyretin (TTR) Promoter Screening for Gene Expression Knockdown

[1035] Experiments were undertaken to develop base editor systems suitable for knocking out expression of the TTR gene in humans through introducing alterations to the promoter region of the gene.

[1036] Sequence homology between the murine (see, Costa, R. H. & Grayson, D. R. Site-directed mutagenesis of hepatocyte nuclear factor (HNF) binding sites in the mouse transthyretin (TTR) promoter reveal synergistic interactions with its enhancer region. Nucleic Acids Res 19, 4139-4145 (1991), the disclosure of which is incorporated herein by reference in its entirety for all purposes; GGCAAGGTTCATATTTGTGTAGGTTACTTATTCTCCTTTTGTTGACTAAGTCAATAATCAGA ATCAGCAGG (SEQ ID NO: 1207)) and human TTR promoter regions was used to define the human promoter region to guide the design of guide RNA sequences for use in knocking out TTR in humans (FIGS. 37A and 37B).

[1037] gRNAs corresponding to four CRISPR-Cas enzymes with 3′ PAMs NGG, NGA, NNGRRT and NNNRRT were designed to tile the reported promoter region (FIGS. 37A and 37B). A base editing strategy was designed to generate mutations within the promoter region that would knock down TTR mRNA expression. 3′ NGG PAM gRNAs were designed to be paired with an S. pyogenes CRISPR-Cas9-containing base editor. 3′ NGA PAM gRNAs were designed to be paired with a mutated S. pyogenes CRISPR-Cas9-containing base editor. 3′ NNGRRT PAM gRNAs were designed to be paired with an S. aureus CRISPR-Cas9-containing base editor. 3′ NNNRRT PAM gRNAs were designed to be paired with a mutated S. aureus CRISPR-Cas9-containing base editor.

[1038] An in silico off-target analysis of these gRNAs was run and any gRNAs with a 0, 1, 2 or 3 nucleotide mismatch to a tumor suppressor gene were excluded from the screen due to potential off-target effects. The gRNA list was filtered further to remove any gRNAs with 0 or 1 mismatch to any location in the human genome and 0, 1 or 2 mismatches to any exon in the human genome. This filtered list contained 47 unique gRNAs that covering the target promoter region (FIGS. 37A and 37B). These 47 gRNAs could be paired with either an Adenine Base Editor (ABE) or Cytosine Base Editor (CBE) to make 94 unique guide-base editor type combinations.

Dna Editing Efficiency for gRNAs with Base Editors

[1039] A cellular screen for gRNA potency was undertaken. This screen used mRNA encoding for the base editor of interest and a chemically synthesized, chemically end-protected gRNA. The screening was performed in HepG2 human cells. Three replicates were transfected into cells on the same day. DNA was harvested for next generation sequencing three days post-transfection.

[1040] Positive controls for genome editing were the following: a gRNA-mRNA pair that was known to have good editing efficiencies and did not target DNA predicted to have any impact on TTR mRNA expression (sgRNA_088 paired with NGG-SpCas9-ABE8.8), three gRNA-base editor pairs targeting splice sites within the TTR gene (gRNAs sg_361, sg_362, gRNA1597 and gRNA1604), and one Cas9 nuclease combined with a gRNA known to be suitable for inducing TTR knockdown in human (Cas9 nuclease+gRNA991) (Gillmore, J. D. et al. CRISPR-Cas9 In Vivo Gene Editing for Transthyretin Amyloidosis. New Engl J Med 385, 493-502 (2021)).

[1041] Negative controls for genome editing were the following: no treatment, and a catalytically dead Cas9 nuclease plus gRNA991 (dead Cas9 nuclease+gRNA991).

[1042] Each gRNA for the promoter screen was paired with either a CBE (here using the ppAPOBEC1 deaminase described in Yu, Y. et al. Cytosine base editors with minimized unguided DNA and RNA off-target events and high on-target activity. Nat Commun 11, 2052 (2020)) or an ABE (here using ABE8.20, described in Gaudelli, N. M. et al. Directed evolution of adenine base editors with increased activity and therapeutic application. Nat Biotechnol 38, 892-900 (2020)). Next-generation sequencing (NGS) data indicated that, when paired with CBEs, 22/46 promoter tiling gRNAs yielded mean editing frequencies >80% and 9/46 gRNAs yielded editing frequencies <10%. (FIG. 38). When paired with ABEs, 24/47 promoter tiling gRNAs yielded >80% mean editing frequency, and 4/47 gRNAs yielded mean editing frequencies <10%.

Ttr Knockdown Efficiency Resulting from Promoter Editing

[1043] TTR Knockdown efficiency was measured using RT-qPCR for all promoter screening gRNAs and the control gRNAs. One of the gRNAs that served as a positive control for DNA editing also served as a negative control for TTR knockdown: the gRNA-mRNA pair that typically yielded high editing efficiencies and did not target DNA known to have any impact on TTR mRNA expression (sgRNA_088 paired with NGG-SpCas9-ABE8.8). The other negative controls included no treatment controls, which were used in each plate run for RT-qPCR, and a catalytically dead Cas9 combined with gRNA_991.

[1044] Positive controls for TTR knockdown were the following: three previously identified gRNA-base editor pairs targeting splice sites within the TTR gene (gRNAs sg_361, sg_362, gRNA1597) and one Cas9 nuclease combined with a gRNA known to induce TTR knockdown in humans (Cas9 nuclease+gRNA991).

[1045] An internal control (ACTB) with an orthogonal fluorescent probe to the test probe (TTR) was used to enable RT-qPCR samples to be accurately compared between wells. Fold-change differences in TTR mRNA abundance between the no treatment controls and each test treatment well was measured using the mean of the ΔCt(TTR-ACTB)_{control} for the no treatment wells present in each plate. The approach used to find relative TTR expression level was 2∧(−1*(ΔCt (TTR-ACTB)ₛₐₘₚₗₑ-ΔCt(TTR-ACTB)_{control}) (Livak, K. J. & Schmittgen, T. D. Analysis of Relative Gene Expression Data Using Real-Time Quantitative PCR and the 2-ΔΔC T Method. Methods 25, 402-408 (2001)). Untreated cells had a different TTR: ACTB ratio from transfected cells, which led to an artificially reduced relative TTR expression (0.30-0.42) in cells transfected with the negative control catalytically dead Cas9 editor or gRNA that did not affect TTR expression. Nonetheless, this approach was suitable as a relative approach to compare TTR knockdown efficacy between different transfection conditions.

[1046] In total, 21/94 base editor-gRNA combinations (which are notated throughout this disclosure as “Base_Editor_Name_gRNA_name”) tested showed comparable or greater TTR knockdown than the positive control gRNA_991 (FIGS. 40A and 40B). Of five potent promoter tiling gRNAs, one, when combined with an ABE, edited the sequence proposed to be the TATA box for TTR (gRNA1786), and one, when combined with an ABE, disrupted the ATG start codon (gRNA1772). The other three bind elsewhere in the promoter region.

[1047] The following materials and methods were employed in this Example.

### Cell Transfection

[1048] HepG2 cells were plated into a 48-well poly-D-lysine (PDL)-coated plate (Corning, 354509) at a density of 25,000 cells/well in 200 μL of supplemented media 24-hours prior to transfection. On the day of transfection, 600 ng of mRNA encoding for the desired editor (produced at Beam) and 200 ng chemically end-protected gRNA (IDT) was aliquoted out and into 96-well plates. Lipofectamine MessengerMax (Thermo Fisher, LMRNA015) was diluted in Optimem (Thermo Fisher, 31985062), vortexed thoroughly and incubated at room temperature for at least 5 minutes before being added onto the pre-aliquoted mRNA and gRNA mix at a final concentration of 1.5 μL MessengerMax lipid per well. The lipid encapsulated mRNA and gRNA mix was incubated at room temperature for 10-20 mins before being added onto cell plates.

### Cell Culture

[1049] HepG2 cells (ATCC, HB8065) were cultured according to the manufacturer's protocols and split at least every four days. Cells were cultured in EMEM (Gibco, 670086), supplemented with 10% Fetal Bovine Serum (Thermo Fisher, A3160401).

### Next Generation DNA Sequencing (NGS)

[1050] DNA was harvested from transfected cells 3 days post-transfection. Media was removed from cells and 100 μL of thawed Quick Extract lysis buffer (Lucigen, QEP70750) was added to each well. The buffer-cell mixture was incubated at 65° C. for 8 mins and then at 98° C. for 15 mins. PCR was performed to amplify the gRNA target region each sample. A second round of PCR was performed to add barcoding adapters onto the product from PCR1. The resulting product was purified and sequenced using a 300-kit on a Miseq (Illumina). DNA sequence alignment with a reference sequence and editing quantification was performed on the resulting sequences. Maximum editing (plotted in FIGS. 38 and 39) corresponded to the highest value for either an A-to-G edit or a C-to-T edit for any base within a gRNA protospacer and PAM region.

### RT-qPCR

[1051] Cells were frozen down 5 days post-transfection. Media was removed from each well and the resulting plates were sealed and stored at −80° C. RNA was harvested subsequently using the RNeasy PLUS kit (Qiagen) in 96 well plate format according to the manufacturer's instructions (74192). After RNA was isolated, Taqpath 1-step RT-qPCR Master Mix CG (Thermo Fisher, A15299) with two probes: ACTB with VIC(4448489) and TTR with FAM (4331182), all Thermo Fisher. The probes were used according to the manufacturer's instructions with 0.5 μL of RNA input in a 20 μL reaction to assess relative expression level of TTR. Quantstudio 7 (Thermo Fisher) was used to run the RT-qPCR assay. Three technical replicates were run per plate. Auto thresholds for Ct values were used for each individual value. Any replicates indicating no amplification or inconclusive amplification were excluded from the analysis, resulting in a few samples having only two technical replicates. To calculate relative expression of TTR, the ∧(—1*(ΔCt(TTR-ACTB)ₛₐₘₚₗₑ-ΔCt (TTR-ACTB)_{control}) approach (Livak, K. J. & Schmittgen, T. D. Analysis of Relative Gene Expression Data Using Real-Time Quantitative PCR and the 2-ΔΔC T Method. Methods 25, 402-408 (2001)) was used.

### Example 10: Transthyretin (TRR) Guide Screening and Functional Knockdown Assessment in Hek293T Cells

[1052] Fourteen guide RNAs were designed using a base-editing strategy for splice-site disruption using ABE7.10 alternative PAM editors or IBE variants, for a total of 26 new experimental combinations. Nine (9) tested combinations demonstrated good editing efficiencies in Hek293T cells (FIG. 41).

[1053] Editor mRNA and sgRNAs were transfected in triplicate into Hek293T cells. Spacer sequences for the sgRNAs are provided in Table 2B. All sgRNAs were ordered from IDT with 80-mer spCas9 scaffolds. In addition to the 26 experimental combinations, gRNA991 known to induce TTR knockdown in humans (Gillmore, J. D. et al. CRISPR-Cas9 In Vivo Gene Editing for Transthyretin Amyloidosis. New Engl J Med 385, 493-502 (2021)) combined with spCas9, and no treatment were used as positive and negative controls, respectively. Genomic DNA was harvested 72 hours after transfection and sequenced using Next Generation Sequencing. Total editing resulting in splice site disruption was detected in a range from ˜79%-0.4% depending on the condition, with some combinations yielding total editing resulting in splice disruption in a range between 79% to 63.5%. Most editor variants exhibited detectable editing at target loci. The following combinations displayed relatively high levels of editing: ISLAY3-VRQR gRNA1604; ISLAY3-MQKFRAER_gRNA1597; ABE7.10-MQKFRAER_gRNA1597; ISLAY3_gRNA1599; ISLAY3_gRNA1600; ABE7.10-MQKFRAER_gRNA1594; ISLAY6_gRNA1599; ISLAY6-MQKFRAER_gRNA1597; ISLAY3-MQKFRAER gRNA1601. For a description of the internal base editors (ISLAY) see Tables 4A and 4B. The internal base editors (i.e., ISLAY3 and ISLAY6, each contained a TadA*7.10 deaminase domain. The internal base editors are described in PCT/US20/16285, the disclosure of which is incorporated herein by reference in its entirety for all purposes. In particular, the combination of gRNA1604 and ISLAY3-VRQR exhibited editing efficiencies at ˜79%. The combination of gRNA1597 with both ISLAY3-MQKFRAER and ABE7.10 exhibited good editing efficiencies as well.

[1054] The following materials and methods were employed in this Example.

### Hek293T Cell Culture and Maintenance

[1055] A frozen vial of Hek293T cells at passage count 3 was thawed and mixed with 15 mL of pre-warmed DMEM high glucose pyruvate medium (Thermofisher, 11995065) with 10% Fetal Bovine Serum (Thermofisher, A³¹⁶⁰⁴⁰¹) and Pen/Strep (Thermofisher, 10378016), and plated on a T75 tissue-culture treated flask (Corning, 430641U) at 37° C. in a 5% CO₂ incubator (Thermofisher 51033547). The media was aspirated and replaced the next morning, and every other day thereafter. Upon reaching 70-80% confluency after 3 days, the cells were split at 1:20 via aspiration of media followed by incubation with 2 mL TrypLE (Thermofisher 12605036) for 3 minutes, gentle agitation and pipette mixing, and transfer of 100 μL into 15 mL pre-warmed media again. This process was repeated after another 5 days, during which time cell counts were obtained by averaging two results obtained from a NucleoCounter NC-200 after diluting the 2 mL of TrypLE cell suspension obtained from the flask in 10 mL of media. The cells were then seeded into Poly-D-Lysine 48-well plates (Corning, 354509) at 25kcells/well in 200 μL of media.

### Cell Transfection

[1056] Hek293T cells were transfected the day after seeding. The media was changed prior to transfection. Each well received 200 ng gRNA (Synthego custom order) (sequences for the guide RNA's are provided in Tables 1 and 2B; gRNA991 contained the spacer sequence AAAGGCUGCUGAUGACACCU (SEQ ID NO: 1205) and 600 ng mRNA with 1.5 μL Lipofectamine MessengerMax (Thermofisher, LMRNA150). Guide RNAs were reconstituted from lyophilized form in water at 1 mg/mL, and mRNA was received at 2 mg/mL. gRNA/mRNA and reagent were separately added to 26 μL OptiMEM (Thermofisher, 31985062) per well as half mixes and incubated for 10 minutes, after which the RNA and reagent half mixes were combined and incubated for another 5 min. 54 μL of the combined mastermix was added dropwise to each target culture well. The plates were then briefly and gently nutated and placed at 37° C. and 5% CO₂ in the incubator. Media was changed the following day.

### Next Generation DNA Sequencing (NGS)

[1057] 72 hours after transfection, media was aspirated and genomic DNA was isolated with lysis buffer solution of 10 mM Tris-HCl pH8.0, 0.05% SDS, 50 ug/mL proteinase K (Thermofisher, EO0491). 200 μL of lysis buffer was added per well, and the plates were incubated at 37° C. for 45 minutes, after which the samples were vigorously mixed and 100 μL of the volume was transferred to a 96-well PCR plate. The plate was incubated at 95° C. for 15 minutes and 1 μL was transferred into a PCR mixture. PCR was performed using Q5 Hotstart 2x Mastermix (M0494L) and target site-specific amplicon primers. 25 μL of mastermix, 5 uM each of forward and reverse primer, and to 50 μL of water were used per well. A second round of barcoding PCR was performed with half the volume. PCR products were pooled by amplicon sequence and 166 μL was added to 33 μL Purple 6x Dye (B7024S) and gel extracted in 1% agarose, then purified twice using Zymo Gel Extraction (D4007) and PCR Cleanup (D4013) kits, eluting in 150 μL 10 mM Tris pH7.5. The library concentration was quantified via NanoDrop (Thermofisher, ND-ONE-W), and standardized to 4 nM. Sequencing was performed using a MiSeq Reagent Kit v2 (500 cycles) (Illumina, MS-102-2003), with read alignment to reference sequences and editing efficiency was computationally analyzed.

### Example 11: In Vivo Non-Human Primate (NHP) Base Editing of TTR Gene

[1058] In this example, NHP surrogate sgRNA (GA519, SEQ ID NO. 1044), corresponding to the human sgRNA described above, was prepared, and formulated with ABE8.8 mRNA, encapsulated in lipid nanoparticles (LNP 11 and LNP 12), and intravenously dosed to NHPs. Some objectives of this study were to determine the base editing of LNPs encapsulating mRNA and a single guide RNA, when given intravenously once on Day 1 to cynomolgus monkeys. Both LNP 11 and LNP 12 encapsulate sgRNA (GA519, SEQ ID NO. 1044) and ABE8.8 mRNA. LNP 11 and LNP 12 differed most notably in the ionizable lipids (BLP8-4 vs. LP01) and in the presence of a GalNAc ligand component in LNP 12 formulation. The components of LNP 11 and LNP 12 are indicated in Tables 26 and 27 below, respectively.

TABLE 26
LNP 11 Components

| LNP | | | |
|---|---|---|---|
| 11 Component | Name | Structure | Mol % |
| Amino lipid (BLP8-4) | ((3-hydroxypropyl)azanediyl)bis(heptane- 7,1-diyl)bis(4,4-bis(((Z)-oct-5- en-1-yl)oxy)butanoate)^{##} | [chemical structure] | 47.5 |
| Neutral helper lipid | 1,2-distearoyl-sn-glycero-3-phospho- choline (DSPC) | [chemical structure] | 10 |
| PEG-lipid | 1,2-dimyristoyl-rac-glycero-3-methoxy- polyethylene glycol-2000 (PEG₂₀₀₀-DMG) | [chemical structure] | 2.5 |
| Sterol lipid | Cholesterol | [chemical structure] | 40 |

^{##}described in International Published Patent Application WO 2022 140252

TABLE 27
LNP 12 Components

| LNP 12 | | | |
|---|---|---|---|
| Component | Name | Structure | Mol % |
| Amino lipid | 3-((4,4-bis(octyloxy)butanoyl)oxy)- 2-((((3- (diethylamino)propoxy)carbonyl) oxy)methyl)propyl(9Z,12Z)- octadeca-9,12-dienoate* | [chemical structure] | 50 |
| Neutral helper lipid | 1,2-distearoyl-sn-glycero-3- phosphocholine (DSPC) | [chemical structure] | 9 |
| PEG-lipid | 1,2-dimyristoyl-rac-glycero-3- methoxypolyethylene glycol-2000 (PEG₂₀₀₀-DMG) | [chemical structure] | 3 |
| Sterol lipid | Cholesterol | [chemical structure] | 37.95 |
| GalNAc- lipid | N²-(PEG-DSG)-N⁶-((C5- GalNAc)amido)-Lys-[bis((C5- GalNAc)propylamido)]amide or DSG-PEG-Lys-tris(GalNAc)** | [chemical structure] | 0.05 |

*described in International Published Patent Application WO 2015 095340 A1
**described in International Published Patent Application WO 2021/178725 A1

[1059] It should be understood that the mol % of components in Tables 26 and 27 may be adjusted and that the mol % included in Tables 26 and 27 are targeted excipient percentages of the LNP, which is intended to represent the aggregate mol % of all the LNPs formulated in a given batch and that specific LNPs within a batch may have varying mol %. Thus, it is contemplated herein that the mol % of one or more, or all of the LNP components set forth in Tables 26 and 27 may be adjusted, for example, by +/−1-5%, +/−5-10%, or +/−10%-20%. It is further contemplated herein that the mol % of one or more, or all of the LNP components set forth in Tables 26 and 27 with respect to a specific LNP formulated in a given batch of LNPs formulated in accordance with desired target excipient percentages, may vary from the targeted mol %, for example, by +/−1-5%, +/−5-10%, or +/−10%-20%, or even greater than +/−20%. Further, it should be understood that additional LNP components, including non-lipid components, may be added to the LNP components set-forth in Tables 26 and 27. LNP 11 and LNP 12 were formulated with an sgRNA: mRNA weight ratio of 1:1. In other words, the LNPs were formulated with an equal amount by weight of guide RNA as mRNA. The resulting LNPs encapsulating the sgRNA and mRNA were filtered using 0.22 micron filters.

### NHP Study Design

[1060] In this aspect of the study, male cynomolgus monkeys of Cambodian origin were used as study animals. A premedication regimen comprising dexamethasone and antihistamines (diphenylhydramine and famotidine) was administered to all animals on day-1 and day 1 (predose), at 30 to 60 minutes prior to test article dose administration. Three monkeys were dosed with LNP 11, and three monkey were dosed with LNP 12 on day 1 of the study via a single IV infusion at a dose level of 1 mg of combined sgRNA and mRNA per kg of animal body weight and at a dose volume of 6 mL/kg (n=3/group).

[1061] Blood samples were collected from all animals predose for baseline measurements and post-dose at various time points on days 1 through 8 to assess biomarkers, cytokines, pharmacokinetics, and serum safety parameters. Necropsies were performed on all animals at day 8. Liver biopsy samples were collected to assess TTR gene editing.

### Analysis of Editing Efficiency

[1062] The amount of gene editing in the liver was evaluated by next-generation sequencing of targeted PCR amplicons at the TTR target site. Editing was reported as the percent measure of the editing rate of the A within the ATG start codon. Table 28 below shows the TTR editing efficiency in liver of LNP 11 as compared to LNP 12. The average hepatic TTR editing efficiency (specific allele) is higher in NHP treated with LNP 11 (34.5%) compared to LNP 12 (28.9%).

TABLE 28
Hepatic TTR Editing Efficiency of LNP 11 and LNP 12

| | Dose | | | | | |
|---|---|---|---|---|---|---|
| Product | (mg/kg) | Animal 1 | Animal 2 | Animal 3 | Mean | SD |
| LNP 11 | 1 | 41.6 | 39.2 | 22.6 | 34.5 | 10.4 |
| LNP 12 | 1 | 31.7 | 34.9 | 20.0 | 28.9 | 7.8 |

### Quantification of TTR Protein Expression in Plasma

[1063] TTR protein collected from plasma was quantitated using LC-MS, in which four unique TTR peptide fragments were quantitated from each sample at various time points. Normalized percent plasma cTTR (4-peptide average) at terminal (day 8) vs. pre-dose levels is provided in Table 29 below. LNP 11 showed greater plasma TTR reductions (−38% change from baseline on day 8) when compared to LNP 12 (−12% change from baseline on day 8).

TABLE 29
cTTR Plasma Levels at Terminal vs. Pre-dose

| | Dose | | | | | |
|---|---|---|---|---|---|---|
| Product | (mg/kg) | Animal 1 | Animal 2 | Animal 3 | Mean | SD |
| LNP 11 | 1 | 48% | 53% | 84% | 62% | 19% |
| LNP 12 | 1 | 67% | 90% | 108% | 88% | 16% |

[1064] Thus, infusion of LNP 11 and LNP 12 in NHPs resulted in editing of the TTR gene in the liver, with LNP 11 demonstrating greater editing than LNP 12. The greater editing of LNP 11 in NHPs corresponded to a commensurate increase in the reduction in plasma TTR concentrations in NHPs.

### Example 12: In Vivo Non-human Primate (NHP) Base Editing of TTR Gene

[1065] In this example, NHP surrogate sgRNA (GA519, SEQ ID NO. 1044), corresponding to the human sgRNA described above, was prepared, and formulated with ABE8.8 mRNA, encapsulated in a lipid nanoparticle (LNP 13), and intravenously dosed to NHPs. Objectives of this study included determining the base editing of LNP 13 encapsulating mRNA and a single guide RNA, when given intravenously once on Day 1 to cynomolgus monkeys. The components of LNP 13 are indicated in Table 30 below.

TABLE 30
LNP 13 Components

| LNP | | | |
|---|---|---|---|
| 13 Component | Name | Structure | Mol % |
| Amino lipid (BLP4-71) | 1-(3-((4,4-bis(((Z)-oct-5-en-1- yl)oxy)butanoyl)oxy)-2-(((((1- ethylpiperidin-3- yl)methoxy)carbonyl)oxy)methyl)pro- pyl) 7-(3-pentyloctyl) heptanedioate^{$$} | [chemical structure] | 47.5 |
| Neutral helper lipid | 1,2-distearoyl-sn-glycero-3-phosphocholine (DSPC) | [chemical structure] | 10 |
| PEG-lipid | 1,2-dimyristoyl-rac-glycero-3- methoxypolyethylene glycol-2000 (PEG₂₀₀₀-DMG) | [chemical structure] | 2.5 |
| Sterol lipid | Cholesterol | [chemical structure] | 40 |

^{$$}described in International Published Patent Application WO 2022 159472

[1066] It should be understood that the mol % of components in Table 30 may be adjusted and that the mol % included in Table 30 are targeted excipient percentages of the LNP, which is intended to represent the aggregate mol % of all the LNPs formulated in a given batch and that specific LNPs within a batch may have varying mol %. Thus, it is contemplated herein that the mol % of one or more, or all of the LNP components set forth in Table 30 may be adjusted, for example, by +/−1-5%, +/−5-10%, or +/−10%-20%. It is further contemplated herein that the mol % of one or more, or all of the LNP components set forth in Table 30 with respect to a specific LNP formulated in a given batch of LNPs formulated in accordance with desired target excipient percentages, may vary from the targeted mol %, for example, by +/−1-5%, +/−5-10%, or +/−10%-20%, or even greater than +/−20%. Further, it should be understood that additional LNP components, including non-lipid components, may be added to the LNP components set-forth in Table 30.

[1067] LNP 13 was formulated with an sgRNA: mRNA weight ratio of 1:1. In other words, the LNP was formulated with an equal amount by weight of guide RNA as mRNA. The resulting LNP encapsulating the sgRNA and mRNA was filtered using 0.22 micron filters.

### NHP Study Design

[1068] In this aspect of the study, male cynomolgus monkeys of Cambodian origin were used as study animals. A premedication regimen comprising dexamethasone and antihistamines (diphenylhydramine and famotidine) was administered to all animals on day-1 and day 1 (predose), at 30 to 60 minutes prior to test article dose administration. Three monkeys were dosed with LNP 13 on day 1 of the study via a single IV infusion at a dose level of 2 mg of combined sgRNA and mRNA per kg of animal body weight and at a dose volume of 6 mL/kg (n=3/group). Blood samples were collected from all animals predose for baseline measurements and post-dose at various time points on days 1 through 15 to assess biomarkers, cytokines, pharmacokinetics, and serum safety parameters. Necropsies were performed on all animals at day 15. Liver biopsy samples were collected to assess TTR gene editing.

### Analysis of Editing Efficiency

[1069] The amount of gene editing in the liver was evaluated by next-generation sequencing of targeted PCR amplicons at the TTR target site. Editing was reported as the percent measure of the editing rate within the start codon. Table 31 below shows the TTR editing efficiency in liver of LNP 13. The average hepatic TTR editing efficiency for LNP 13 was 20.8%.

TABLE 31
Hepatic TTR Editing Efficiency of LNP 13

| | Dose | | | | | |
|---|---|---|---|---|---|---|
| Product | (mg/kg) | Animal 1 | Animal 2 | Animal 3 | Mean | SD |
| LNP 13 | 2 | 17.2 | 31.3 | 13.9 | 20.8 | 9.2 |

### Quantification of TTR Protein Expression in Plasma

[1070] TTR protein collected from plasma was quantitated using LC-MS, in which four unique TTR peptide fragments were quantitated from each sample at various time points. Normalized percent plasma cTTR (4-peptide average) at terminal (day 15) vs. pre-dose levels is provided in Table 32 below. LNP 13 showed plasma TTR reduction of −23% change from baseline on day 15.

TABLE 32
cTTR Plasma Levels at Terminal vs. Pre-dose

| | Dose | | | | | |
|---|---|---|---|---|---|---|
| Product | (mg/kg) | Animal 1 | Animal 2 | Animal 3 | Mean | SD |
| LNP 13 | 2 | 63% | 47% | 120% | 77% | 39% |

Thus, infusion of LNP 13 in NHPs resulted in editing of the TTR gene in the liver and reduction in serum TTR concentrations.

[1071] The following materials and methods were employed in Examples 5-10.

### General HEK293T Mammalian Culture Conditions

[1072] Cells were cultured at 37° C. with 5% CO₂. HEK293T cells [CLBTx013, American Type Cell Culture Collection (ATCC)] were cultured in Dulbecco's modified Eagles medium plus Glutamax (10566-016, Thermo Fisher Scientific) with 10% (v/v) fetal bovine serum (A31606-02, Thermo Fisher Scientific). Cells were tested negative for mycoplasma after receipt from supplier.

### Lipotransfection

[1073] HEK293T cells were seeded onto 48-well well Poly-D-Lysine treated BioCoat plates (Corning) at a density of 35,000 cells/well and transfected 18-24 hours after plating. Cells were counted using a NucleoCounter NC-200 (Chemometec). A solution was prepared containing Opti-MEM reduced serum media (ThermoFisher Scientific), the base editor, nuclease, or control mRNA, and sgRNA. The solution was combined with Lipofectamine MessengerMAX (ThermoFisher) in Opti-MEM reduced serum media and left to rest at room temperature for 15 min. The resulting mixture was then transferred to the pre-seeded Hek293T cells and left to incubate for about 120 h.

### Dna Extraction and Analysis of Editing

[1074] Cells were harvested and DNA was extracted. For DNA analysis, cells were washed once in 1×PBS, and then lysed in 100 μl QuickExtract™ Buffer (Lucigen) according to the manufacturer's instructions.

[1075] Genomic DNA was sequences using Illumina Miseq sequencers following PCR to amplify edited regions.

mRNA Production

[1076] All base editor and bhCas12b mRNA was generated using the following synthesis protocol. Base editors or bhCas12b were cloned into a plasmid encoding a dT7 promoter followed by a 5′UTR, Kozak sequence, ORF, and 3′UTR. The dT7 promoter carries an inactivating point mutation within the T7 promoter that prevents transcription from circular plasmid. This plasmid templated a PCR reaction (Q5 Hot Start 2X Master Mix), in which the forward primer corrected the SNP within the T7 promoter and the reverse primer appended a poly A tail to the 3′ UTR. The resulting PCR product was purified on a Zymo Research 25 ug DCC column and used as mRNA template in the subsequent in vitro transcription. The NEB HiScribe High-Yield Kit was used according to the instruction manual, but with full substitution of N1-methyl-pseudouridine for uridine and co-transcriptional capping with CleanCap AG (Trilink). Reaction cleanup was performed by lithium chloride precipitation. Primers used for amplification can be found in Table 33.

TABLE 33
Primers used for ABE8 T7 in vitro transcription reactions

| Name | Sequence |
|---|---|
| fwd_IVT | TCGAGCTCGGTACCTAATACGACTCAC (SEQ ID NO: 1208) |
| rev_IVT | TTTTTTTTTTTTTTTTTTTTTTTTTTTTTTTTTTTTTTTTTTTTTTTTTTTTT |
| | TTTTTTTTTTTTTTTTTTTTTTTTTTTTTTTTTTTTTTTTTTTTTTTTTTTTT |
| | TTTTTTTTTTTTTTCTTCCTACTCAGGCTTTATTCAAAGACCA (SEQ ID NO: |
| | 1209) |

TABLE 34
gRNA spacer sequence with PS linkage at 5′ end
gRNA spacer sequence (5′-3′)

gscscsAUCCUGCCAAGAAUGAG (SEQ ID
NO: 472)
gscscsAUCCUGCCAAGAACGAG (SEQ ID
NO: 1210)
gscsasACUUACCCAGAGGCAAA (SEQ ID
NO: 1211)
usasusAGGAAAACCAGUGAGUC (SEQ ID
NO: 1212)
usascsUCACCUCUGCAUGCUCA (SEQ ID
NO: 1213)
gscscsAUCCUGCCAAGAACGAG (SEQ ID
NO: 1210)

wherein: A is adenosine; C is cytidine; G is guanosine; U is uridine; a is 2′-O-methyladenosine; c is 2′-O-methylcytidine; g is 2′-O-methylguanosine; u is 2′-O-methyluridine and s is phosphorothioate (PS) backbone linkage.

TABLE 35
gRNA spacer sequence without PS linkage
gRNA spacer sequence (5′-3′)

GCCAUCCUGCCAAGAAUGAG (SEQ ID NO:
472)
GCCAUCCUGCCAAGAACGAG (SEQ ID NO:
473)
GCAACUUACCCAGAGGCAAA (SEQ ID NO:
474)
UAUAGGAAAACCAGUGAGUC (SEQ ID NO:
475)
UACUCACCUCUGCAUGCUCA (SEQ ID NO:
476)

wherein A is a modified or unmodified adenosine; C is a modified or unmodified cytidine; G is modified or unmodified guanosine; and U is a modified or unmodified uridine

TABLE 36
Guide RNA sequence
Guide RNA sequence (5′-3′)

gscscsAUCCUGCCAAGAAUGAGGUUUUAGAGCUAGAAAUAGCAAGUUAAAAUAAGGCUAG
UCCGUUAUCAACUUGAAAAAGUGGCACCGAGUCGGUGCUsususu (SEQ ID NO:
479)
AUCCUGCCAAGAACGAGGUUUUAGAGCUAGAAAUAGCAAGUUAAAAUAAGGCUAGUCCGUU
AUCAACUUGAAAAAGUGGCACCGAGUCGGUGCUsususu (SEQ ID NO: 1214)
gscsasACUUACCCAGAGGCAAAGUUUUAGAGCUAGAAAUAGCAAGUUAAAAUAAGGCUAG
UCCGUUAUCAACUUGAAAAAGUGGCACCGAGUCGGUGCUsususu (SEQ ID NO:
499)
usasusAGGAAAACCAGUGAGUCGUUUUAGAGCUAGAAAUAGCAAGUUAAAAUAAGGCUAG
UCCGUUAUCAACUUGAAAAAGUGGCACCGAGUCGGUGCUsususu (SEQ ID NO:
497)
usascsUCACCUCUGCAUGCUCAGUUUUAGAGCUAGAAAUAGCAAGUUAAAAUAAGGCUAG
UCCGUUAUCAACUUGAAAAAGUGGCACCGAGUCGGUGCUsususu (SEQ ID NO:
480)
gscscsAUCCUGCCAAGAACGAGgUUUUAGagcuaGaaauagcaaGUUaAaAuAaggcuaG
UccGUUAucAAcuuGaaaaagugGcaccgagucggugcuususus (SEQ ID NO:
1044)
usasusAGGAAAACCAGUGAGUCgUUUUAGagcuaGaaauagcaaGUUaAaAuAaggcuaG
UccGUUAucAAcuuGaaaaagugGcaccgagucggugcuususus (SEQ ID NO:
497)
wherein A is adenosine; C is cytidine; G is guanosine; U is uridine; a is 2′-O-methyladenosine; c is 2′-O-methylcytidine; g is 2′-O-methylguanosine; u is 2′-O-methyluridine and s is phosphorothioate (PS) backbone linkage and wherein bold type represents the spacer sequence.

TABLE 37
Guide RNA sequence
gRNA sequence (5′-3′)

GCCAUCCUGCCAAGAAUGAGGUUUUAGAGCUAGAAAUAGCAAGUUAAAAUAAGGCUAGUCC
GUUAUCAACUUGAAAAAGUGGCACCGAGUCGGUGCUUUU (SEQ ID NO: 477)
GCCAUCCUGCCAAGAACGAGGUUUUAGAGCUAGAAAUAGCAAGUUAAAAUAAGGCUAGUCC
GUUAUCAACUUGAAAAAGUGGCACCGAGUCGGUGCUUUU (SEQ ID NO: 1044)
GCAACUUACCCAGAGGCAAAGUUUUAGAGCUAGAAAUAGCAAGUUAAAAUAAGGCUAGUCC
GUUAUCAACUUGAAAAAGUGGCACCGAGUCGGUGCUUUU (SEQ ID NO: 499)
UAUAGGAAAACCAGUGAGUCGUUUUAGAGCUAGAAAUAGCAAGUUAAAAUAAGGCUAGUCC
GUUAUCAACUUGAAAAAGUGGCACCGAGUCGGUGCUUUU (SEQ ID NO: 497)
UACUCACCUCUGCAUGCUCAGUUUUAGAGCUAGAAAUAGCAAGUUAAAAUAAGGCUAGUCC
GUUAUCAACUUGAAAAAGUGGCACCGAGUCGGUGCUUUU (SEQ ID NO: 480)
GCCAUCCUGCCAAGAACGAGGUUUUAGAGCUAGAAAUAGCAAGUUAAAAUAAGGCUAGUCC
GUUAUCAACUUGAAAAAGUGGCACCGAGUCGGUGCUUUU (SEQ ID NO: 1044)

### OTHER EMBODIMENTS

[1077] From the foregoing description, it will be apparent that variations and modifications may be made to the aspects or embodiments described herein to adopt it to various usages and conditions. Such embodiments are also within the scope of the following claims.

[1078] The recitation of a listing of elements in any definition of a variable herein includes definitions of that variable as any single element or combination (or subcombination) of listed elements. The recitation of an embodiment herein includes that embodiment as any single embodiment or in combination with any other embodiments or portions thereof.

[1079] All patents and publications mentioned in this specification are herein incorporated by reference to the same extent as if each independent patent and publication was specifically and individually indicated to be incorporated by reference. The disclosure may be related to International Patent Applications No. PCT/US2022/030359, filed May 20, 2022, PCT/US2022/029278, filed May 13, 2022, and PCT/US23/79329, filed Nov. 10, 2023, the disclosures of which are each incorporated herein by reference in their entireties for all purposes.

The application's sequence listing, which the Patent Office published only in electronic form, follows.

SEQUENCE LISTING (1230 sequences)

SEQ ID NO: 1 - protein, 167 aa, Escherichia coli
  REGION 1..167: note = misc_feature - TadA*7.10 (ecTadA) polypeptide sequence
MSEVEFSHEYWMRHALTLAKRARDEREVPVGAVLVLNNRVIGEGWNRAIGLHDPTAHAEIMALRQGGLVMQNYRLIDATLYVTFEPCVMCAGAMIHSRIGRVVFGVRNAKTGAAGSLMDVLHYPGMNHRVEITEGILADECAALLCYFFRMPRQVFNAQKKAQSSTD

SEQ ID NO: 2 - DNA, 4092 bp, synthetic construct
  misc_feature 1..4092: note = BhCas12b GGSGGS-ABE8-Xten20at P153 polynucleotide sequence
  misc_feature 1..6: note = Kozak sequence
  misc_feature 7..57: note = Sequence encoding N-terminal nuclear localization signal
  misc_feature 58..513: note = Sequence encoding BhCas12b
  misc_feature 514..531: note = Sequence encoding a linker
  misc_feature 532..1029: note = Sequence encoding TadA*8
  misc_feature 1030..1089: note = Sequence encoding Xten20 linker
  misc_feature 1090..3954: note = Sequence encoding BhCas12b
  misc_feature 3955..4002: note = Sequence encoding C-terminal NLS
  misc_feature 4003..4008: note = Sequence encoding GS linker
  misc_feature 4009..4089: note = Sequence encoding 3x hemagglutinin (HA) tag
  source 1..4092: mol_type = other DNA
gccaccatggccccaaagaagaagcggaaggtcggtatccacggagtcccagcagccgccaccagatccttcatcctgaagatcgagcccaacgaggaagtgaagaaaggcctctggaaaacccacgaggtgctgaaccacggaatcgcctactacatgaatatcctgaagctgatccggcaagaggccatctacgagcaccacgagcaggaccccaagaatcccaagaaggtgtccaaggccgagatccaggccgagctgtgggatttcgtgctgaagatgcagaagtgcaacagcttcacacacgaggtggacaaggacgaggtgttcaacatcctgagagagctgtacgaggaactggtgcccagcagcgtggaaaagaagggcgaagccaaccagctgagcaacaagtttctgtaccctctggtggaccccaacagccagtctggaaagggaacagccagcagcggcagaaagcccagatggtacaacctgaagattgccggcgatcccggaggctctggaggaagctccgaagtcgagttttcccatgagtactggatgagacacgcattgactctcgcaaagagggctcgagatgaacgcgaggtgcccgtgggggcagtactcgtgctcaacaatcgcgtaatcggcgaaggttggaatagggcaatcggactccacgaccccactgcacatgcggaaatcatggcccttcgacagggagggcttgtgatgcagaattatcgactttatgatgcgacgctgtacgtcacgtttgaaccttgcgtaatgtgcgcgggagctatgattcactcccgcattggacgagttgtattcggtgttcgcaacgccaagacgggtgccgcaggttcactgatggacgtgctgcatcatccaggcatgaaccaccgggtagaaatcacagaaggcatattggcggacgaatgtgcggcgctgttgtgtcgtttttttcgcatgcccaggcgggtctttaacgcccagaaaaaagcacaatcctctactgacggctcttctggatctgaaacacctggcacaagcgagagcgccacccctgagagctctggctcctgggaagaagagaagaagaagtgggaagaagataagaaaaaggacccgctggccaagatcctgggcaagctggctgagtacggactgatccctctgttcatcccctacaccgacagcaacgagcccatcgtgaaagaaatcaagtggatggaaaagtcccggaaccagagcgtgcggcggctggataaggacatgttcattcaggccctggaacggttcctgagctgggagagctggaacctgaaagtgaaagaggaatacgagaaggtcgagaaagagtacaagaccctggaagagaggatcaaagaggacatccaggctctgaaggctctggaacagtatgagaaagagcggcaagaacagctgctgcgggacaccctgaacaccaacgagtaccggctgagcaagagaggccttagaggctggcgggaaatcatccagaaatggctgaaaatggacgagaacgagccctccgagaagtacctggaagtgttcaaggactaccagcggaagcaccctagagaggccggcgattacagcgtgtacgagttcctgtccaagaaagagaaccacttcatctggcggaatcaccctgagtacccctacctgtacgccaccttctgcgagatcgacaagaaaaagaaggacgccaagcagcaggccaccttcacactggccgatcctatcaatcaccctctgtgggtccgattcgaggaaagaagcggcagcaacctgaacaagtacagaatcctgaccgagcagctgcacaccgagaagctgaagaaaaagctgacagtgcagctggaccggctgatctaccctacagaatctggcggctgggaagagaagggcaaagtggacattgtgctgctgcccagccggcagttctacaaccagatcttcctggacatcgaggaaaagggcaagcacgccttcacctacaaggatgagagcatcaagttccctctgaagggcacactcggcggagccagagtgcagttcgacagagatcacctgagaagataccctcacaaggtggaaagcggcaacgtgggcagaatctacttcaacatgaccgtgaacatcgagcctacagagtccccagtgtccaagtctctgaagatccaccgggacgacttccccaaggtggtcaacttcaagcccaaagaactgaccgagtggatcaaggacagcaagggcaagaaactgaagtccggcatcgagtccctggaaatcggcctgagagtgatgagcatcgacctgggacagagacaggccgctgccgcctctattttcgaggtggtggatcagaagcccgacatcgaaggcaagctgtttttcccaatcaagggcaccgagctgtatgccgtgcacagagccagcttcaacatcaagctgcccggcgagacactggtcaagagcagagaagtgctgcggaaggccagagaggacaatctgaaactgatgaaccagaagctcaacttcctgcggaacgtgctgcacttccagcagttcgaggacatcaccgagagagagaagcgggtcaccaagtggatcagcagacaagagaacagcgacgtgcccctggtgtaccaggatgagctgatccagatccgcgagctgatgtacaagccttacaaggactgggtcgccttcctgaagcagctccacaagagactggaagtcgagatcggcaaagaagtgaagcactggcggaagtccctgagcgacggaagaaagggcctgtacggcatctccctgaagaacatcgacgagatcgatcggacccggaagttcctgctgagatggtccctgaggcctaccgaacctggcgaagtgcgtagactggaacccggccagagattcgccatcgaccagctgaatcacctgaacgccctgaaagaagatcggctgaagaagatggccaacaccatcatcatgcacgccctgggctactgctacgacgtgcggaagaagaaatggcaggctaagaaccccgcctgccagatcatcctgttcgaggatctgagcaactacaacccctacgaggaaaggtcccgcttcgagaacagcaagctcatgaagtggtccagacgcgagatccccagacaggttgcactgcagggcgagatctatggcctgcaagtgggagaagtgggcgctcagttcagcagcagattccacgccaagacaggcagccctggcatcagatgtagcgtcgtgaccaaagagaagctgcaggacaatcggttcttcaagaatctgcagagagagggcagactgaccctggacaaaatcgccgtgctgaaagagggcgatctgtacccagacaaaggcggcgagaagttcatcagcctgagcaaggatcggaagtgcgtgaccacacacgccgacatcaacgccgctcagaacctgcagaagcggttctggacaagaacccacggcttctacaaggtgtactgcaaggcctaccaggtggacggccagaccgtgtacatccctgagagcaaggaccagaagcagaagatcatcgaagagttcggcgagggctacttcattctgaaggacggggtgtacgaatgggtcaacgccggcaagctgaaaatcaagaagggcagctccaagcagagcagcagcgagctggtggatagcgacatcctgaaagacagcttcgacctggcctccgagctgaaaggcgaaaagctgatgctgtacagggaccccagcggcaatgtgttccccagcgacaaatggatggccgctggcgtgttcttcggaaagctggaacgcatcctgatcagcaagctgaccaaccagtactccatcagcaccatcgaggacgacagcagcaagcagtctatgaaaaggccggcggccacgaaaaaggccggccaggcaaaaaagaaaaagggatcctacccatacgatgttccagattacgcttatccctacgacgtgcctgattatgcatacccatatgatgtccccgactatgcctaa

SEQ ID NO: 3 - protein, 1361 aa, synthetic construct
  REGION 1..1361: note = BhCas12b GGSGGS-ABE8-Xten20at P153 polypeptide sequence
MAPKKKRKVGIHGVPAAATRSFILKIEPNEEVKKGLWKTHEVLNHGIAYYMNILKLIRQEAIYEHHEQDPKNPKKVSKAEIQAELWDFVLKMQKCNSFTHEVDKDEVFNILRELYEELVPSSVEKKGEANQLSNKFLYPLVDPNSQSGKGTASSGRKPRWYNLKIAGDPGGSGGSSEVEFSHEYWMRHALTLAKRARDEREVPVGAVLVLNNRVIGEGWNRAIGLHDPTAHAEIMALRQGGLVMQNYRLYDATLYVTFEPCVMCAGAMIHSRIGRVVFGVRNAKTGAAGSLMDVLHHPGMNHRVEITEGILADECAALLCRFFRMPRRVFNAQKKAQSSTDGSSGSETPGTSESATPESSGSWEEEKKKWEEDKKKDPLAKILGKLAEYGLIPLFIPYTDSNEPIVKEIKWMEKSRNQSVRRLDKDMFIQALERFLSWESWNLKVKEEYEKVEKEYKTLEERIKEDIQALKALEQYEKERQEQLLRDTLNTNEYRLSKRGLRGWREIIQKWLKMDENEPSEKYLEVFKDYQRKHPREAGDYSVYEFLSKKENHFIWRNHPEYPYLYATFCEIDKKKKDAKQQATFTLADPINHPLWVRFEERSGSNLNKYRILTEQLHTEKLKKKLTVQLDRLIYPTESGGWEEKGKVDIVLLPSRQFYNQIFLDIEEKGKHAFTYKDESIKFPLKGTLGGARVQFDRDHLRRYPHKVESGNVGRIYFNMTVNIEPTESPVSKSLKIHRDDFPKVVNFKPKELTEWIKDSKGKKLKSGIESLEIGLRVMSIDLGQRQAAAASIFEVVDQKPDIEGKLFFPIKGTELYAVHRASFNIKLPGETLVKSREVLRKAREDNLKLMNQKLNFLRNVLHFQQFEDITEREKRVTKWISRQENSDVPLVYQDELIQIRELMYKPYKDWVAFLKQLHKRLEVEIGKEVKHWRKSLSDGRKGLYGISLKNIDEIDRTRKFLLRWSLRPTEPGEVRRLEPGQRFAIDQLNHLNALKEDRLKKMANTIIMHALGYCYDVRKKKWQAKNPACQIILFEDLSNYNPYEERSRFENSKLMKWSRREIPRQVALQGEIYGLQVGEVGAQFSSRFHAKTGSPGIRCSVVTKEKLQDNRFFKNLQREGRLTLDKIAVLKEGDLYPDKGGEKFISLSKDRKCVTTHADINAAQNLQKRFWTRTHGFYKVYCKAYQVDGQTVYIPESKDQKQKIIEEFGEGYFILKDGVYEWVNAGKLKIKKGSSKQSSSELVDSDILKDSFDLASELKGEKLMLYRDPSGNVFPSDKWMAAGVFFGKLERILISKLTNQYSISTIEDDSSKQSMKRPAATKKAGQAKKKKGSYPYDVPDYAYPYDVPDYAYPYDVPDYA

SEQ ID NO: 4 - DNA, 4092 bp, synthetic construct
  misc_feature 1..4092: note = BhCas12b GGSGGS-ABE8-Xten20at K255 polynucleotide sequence
  misc_feature 1..6: note = Kozak sequence
  misc_feature 7..57: note = Sequence encoding N-terminal nuclear localization signal (NLS)
  misc_feature 58..822: note = Sequence encoding BhCas12b
  misc_feature 823..840: note = Sequence encoding a linker
  misc_feature 841..1338: note = Sequence encoding TadA*8
  misc_feature 1339..1398: note = Sequence encoding Xten20 linker
  misc_feature 1399..3954: note = Sequence encoding BhCas12b
  misc_feature 3955..4002: note = Sequence encoding C-terminal NLS
  misc_feature 4003..4008: note = Sequence encoding a GS linker
  misc_feature 4009..4089: note = Sequence encoding 3x hemagglutinin (HA) tag
  source 1..4092: mol_type = other DNA
gccaccatggccccaaagaagaagcggaaggtcggtatccacggagtcccagcagccgccaccagatccttcatcctgaagatcgagcccaacgaggaagtgaagaaaggcctctggaaaacccacgaggtgctgaaccacggaatcgcctactacatgaatatcctgaagctgatccggcaagaggccatctacgagcaccacgagcaggaccccaagaatcccaagaaggtgtccaaggccgagatccaggccgagctgtgggatttcgtgctgaagatgcagaagtgcaacagcttcacacacgaggtggacaaggacgaggtgttcaacatcctgagagagctgtacgaggaactggtgcccagcagcgtggaaaagaagggcgaagccaaccagctgagcaacaagtttctgtaccctctggtggaccccaacagccagtctggaaagggaacagccagcagcggcagaaagcccagatggtacaacctgaagattgccggcgatccctcctgggaagaagagaagaagaagtgggaagaagataagaaaaaggacccgctggccaagatcctgggcaagctggctgagtacggactgatccctctgttcatcccctacaccgacagcaacgagcccatcgtgaaagaaatcaagtggatggaaaagtcccggaaccagagcgtgcggcggctggataaggacatgttcattcaggccctggaacggttcctgagctgggagagctggaacctgaaagtgaaagaggaatacgagaaggtcgagaaagagtacaagaccctggaagagaggatcaaaggaggctctggaggaagctccgaagtcgagttttcccatgagtactggatgagacacgcattgactctcgcaaagagggctcgagatgaacgcgaggtgcccgtgggggcagtactcgtgctcaacaatcgcgtaatcggcgaaggttggaatagggcaatcggactccacgaccccactgcacatgcggaaatcatggcccttcgacagggagggcttgtgatgcagaattatcgactttatgatgcgacgctgtacgtcacgtttgaaccttgcgtaatgtgcgcgggagctatgattcactcccgcattggacgagttgtattcggtgttcgcaacgccaagacgggtgccgcaggttcactgatggacgtgctgcatcatccaggcatgaaccaccgggtagaaatcacagaaggcatattggcggacgaatgtgcggcgctgttgtgtcgtttttttcgcatgcccaggcgggtctttaacgcccagaaaaaagcacaatcctctactgacggctcttctggatctgaaacacctggcacaagcgagagcgccacccctgagagctctggcgaggacatccaggctctgaaggctctggaacagtatgagaaagagcggcaagaacagctgctgcgggacaccctgaacaccaacgagtaccggctgagcaagagaggccttagaggctggcgggaaatcatccagaaatggctgaaaatggacgagaacgagccctccgagaagtacctggaagtgttcaaggactaccagcggaagcaccctagagaggccggcgattacagcgtgtacgagttcctgtccaagaaagagaaccacttcatctggcggaatcaccctgagtacccctacctgtacgccaccttctgcgagatcgacaagaaaaagaaggacgccaagcagcaggccaccttcacactggccgatcctatcaatcaccctctgtgggtccgattcgaggaaagaagcggcagcaacctgaacaagtacagaatcctgaccgagcagctgcacaccgagaagctgaagaaaaagctgacagtgcagctggaccggctgatctaccctacagaatctggcggctgggaagagaagggcaaagtggacattgtgctgctgcccagccggcagttctacaaccagatcttcctggacatcgaggaaaagggcaagcacgccttcacctacaaggatgagagcatcaagttccctctgaagggcacactcggcggagccagagtgcagttcgacagagatcacctgagaagataccctcacaaggtggaaagcggcaacgtgggcagaatctacttcaacatgaccgtgaacatcgagcctacagagtccccagtgtccaagtctctgaagatccaccgggacgacttccccaaggtggtcaacttcaagcccaaagaactgaccgagtggatcaaggacagcaagggcaagaaactgaagtccggcatcgagtccctggaaatcggcctgagagtgatgagcatcgacctgggacagagacaggccgctgccgcctctattttcgaggtggtggatcagaagcccgacatcgaaggcaagctgtttttcccaatcaagggcaccgagctgtatgccgtgcacagagccagcttcaacatcaagctgcccggcgagacactggtcaagagcagagaagtgctgcggaaggccagagaggacaatctgaaactgatgaaccagaagctcaacttcctgcggaacgtgctgcacttccagcagttcgaggacatcaccgagagagagaagcgggtcaccaagtggatcagcagacaagagaacagcgacgtgcccctggtgtaccaggatgagctgatccagatccgcgagctgatgtacaagccttacaaggactgggtcgccttcctgaagcagctccacaagagactggaagtcgagatcggcaaagaagtgaagcactggcggaagtccctgagcgacggaagaaagggcctgtacggcatctccctgaagaacatcgacgagatcgatcggacccggaagttcctgctgagatggtccctgaggcctaccgaacctggcgaagtgcgtagactggaacccggccagagattcgccatcgaccagctgaatcacctgaacgccctgaaagaagatcggctgaagaagatggccaacaccatcatcatgcacgccctgggctactgctacgacgtgcggaagaagaaatggcaggctaagaaccccgcctgccagatcatcctgttcgaggatctgagcaactacaacccctacgaggaaaggtcccgcttcgagaacagcaagctcatgaagtggtccagacgcgagatccccagacaggttgcactgcagggcgagatctatggcctgcaagtgggagaagtgggcgctcagttcagcagcagattccacgccaagacaggcagccctggcatcagatgtagcgtcgtgaccaaagagaagctgcaggacaatcggttcttcaagaatctgcagagagagggcagactgaccctggacaaaatcgccgtgctgaaagagggcgatctgtacccagacaaaggcggcgagaagttcatcagcctgagcaaggatcggaagtgcgtgaccacacacgccgacatcaacgccgctcagaacctgcagaagcggttctggacaagaacccacggcttctacaaggtgtactgcaaggcctaccaggtggacggccagaccgtgtacatccctgagagcaaggaccagaagcagaagatcatcgaagagttcggcgagggctacttcattctgaaggacggggtgtacgaatgggtcaacgccggcaagctgaaaatcaagaagggcagctccaagcagagcagcagcgagctggtggatagcgacatcctgaaagacagcttcgacctggcctccgagctgaaaggcgaaaagctgatgctgtacagggaccccagcggcaatgtgttccccagcgacaaatggatggccgctggcgtgttcttcggaaagctggaacgcatcctgatcagcaagctgaccaaccagtactccatcagcaccatcgaggacgacagcagcaagcagtctatgaaaaggccggcggccacgaaaaaggccggccaggcaaaaaagaaaaagggatcctacccatacgatgttccagattacgcttatccctacgacgtgcctgattatgcatacccatatgatgtccccgactatgcctaa

SEQ ID NO: 5 - protein, 1361 aa, synthetic construct
  REGION 1..1361: note = BhCas12b GGSGGS-ABE8-Xten20at K255 polypeptide sequence
MAPKKKRKVGIHGVPAAATRSFILKIEPNEEVKKGLWKTHEVLNHGIAYYMNILKLIRQEAIYEHHEQDPKNPKKVSKAEIQAELWDFVLKMQKCNSFTHEVDKDEVFNILRELYEELVPSSVEKKGEANQLSNKFLYPLVDPNSQSGKGTASSGRKPRWYNLKIAGDPSWEEEKKKWEEDKKKDPLAKILGKLAEYGLIPLFIPYTDSNEPIVKEIKWMEKSRNQSVRRLDKDMFIQALERFLSWESWNLKVKEEYEKVEKEYKTLEERIKGGSGGSSEVEFSHEYWMRHALTLAKRARDEREVPVGAVLVLNNRVIGEGWNRAIGLHDPTAHAEIMALRQGGLVMQNYRLYDATLYVTFEPCVMCAGAMIHSRIGRVVFGVRNAKTGAAGSLMDVLHHPGMNHRVEITEGILADECAALLCRFFRMPRRVFNAQKKAQSSTDGSSGSETPGTSESATPESSGEDIQALKALEQYEKERQEQLLRDTLNTNEYRLSKRGLRGWREIIQKWLKMDENEPSEKYLEVFKDYQRKHPREAGDYSVYEFLSKKENHFIWRNHPEYPYLYATFCEIDKKKKDAKQQATFTLADPINHPLWVRFEERSGSNLNKYRILTEQLHTEKLKKKLTVQLDRLIYPTESGGWEEKGKVDIVLLPSRQFYNQIFLDIEEKGKHAFTYKDESIKFPLKGTLGGARVQFDRDHLRRYPHKVESGNVGRIYFNMTVNIEPTESPVSKSLKIHRDDFPKVVNFKPKELTEWIKDSKGKKLKSGIESLEIGLRVMSIDLGQRQAAAASIFEVVDQKPDIEGKLFFPIKGTELYAVHRASFNIKLPGETLVKSREVLRKAREDNLKLMNQKLNFLRNVLHFQQFEDITEREKRVTKWISRQENSDVPLVYQDELIQIRELMYKPYKDWVAFLKQLHKRLEVEIGKEVKHWRKSLSDGRKGLYGISLKNIDEIDRTRKFLLRWSLRPTEPGEVRRLEPGQRFAIDQLNHLNALKEDRLKKMANTIIMHALGYCYDVRKKKWQAKNPACQIILFEDLSNYNPYEERSRFENSKLMKWSRREIPRQVALQGEIYGLQVGEVGAQFSSRFHAKTGSPGIRCSVVTKEKLQDNRFFKNLQREGRLTLDKIAVLKEGDLYPDKGGEKFISLSKDRKCVTTHADINAAQNLQKRFWTRTHGFYKVYCKAYQVDGQTVYIPESKDQKQKIIEEFGEGYFILKDGVYEWVNAGKLKIKKGSSKQSSSELVDSDILKDSFDLASELKGEKLMLYRDPSGNVFPSDKWMAAGVFFGKLERILISKLTNQYSISTIEDDSSKQSMKRPAATKKAGQAKKKKGSYPYDVPDYAYPYDVPDYAYPYDVPDYA

SEQ ID NO: 6 - DNA, 4092 bp, synthetic construct
  misc_feature 1..4092: note = BhCas12b GGSGGS-ABE8-Xten20at D306 polynucleotide sequence
  misc_feature 1..6: note = Kozak sequence
  misc_feature 7..57: note = Sequence encoding N-terminal nuclear localization signal (NLS)
  misc_feature 58..975: note = Sequence encoding BhCas12b
  misc_feature 976..993: note = Sequence encoding a linker
  misc_feature 994..1491: note = Sequence encoding TadA*8
  misc_feature 1492..1551: note = Sequence encoding Xten20 linker
  misc_feature 1552..3954: note = Sequence encoding BhCas12b
  misc_feature 3955..4002: note = Sequence encoding C-terminal NLS
  misc_feature 4003..4008: note = Sequence encoding a GS linker
  misc_feature 4009..4089: note = Sequence encoding 3x hemagglutinin (HA) tag
  source 1..4092: mol_type = other DNA
gccaccatggccccaaagaagaagcggaaggtcggtatccacggagtcccagcagccgccaccagatccttcatcctgaagatcgagcccaacgaggaagtgaagaaaggcctctggaaaacccacgaggtgctgaaccacggaatcgcctactacatgaatatcctgaagctgatccggcaagaggccatctacgagcaccacgagcaggaccccaagaatcccaagaaggtgtccaaggccgagatccaggccgagctgtgggatttcgtgctgaagatgcagaagtgcaacagcttcacacacgaggtggacaaggacgaggtgttcaacatcctgagagagctgtacgaggaactggtgcccagcagcgtggaaaagaagggcgaagccaaccagctgagcaacaagtttctgtaccctctggtggaccccaacagccagtctggaaagggaacagccagcagcggcagaaagcccagatggtacaacctgaagattgccggcgatccctcctgggaagaagagaagaagaagtgggaagaagataagaaaaaggacccgctggccaagatcctgggcaagctggctgagtacggactgatccctctgttcatcccctacaccgacagcaacgagcccatcgtgaaagaaatcaagtggatggaaaagtcccggaaccagagcgtgcggcggctggataaggacatgttcattcaggccctggaacggttcctgagctgggagagctggaacctgaaagtgaaagaggaatacgagaaggtcgagaaagagtacaagaccctggaagagaggatcaaagaggacatccaggctctgaaggctctggaacagtatgagaaagagcggcaagaacagctgctgcgggacaccctgaacaccaacgagtaccggctgagcaagagaggccttagaggctggcgggaaatcatccagaaatggctgaaaatggacggaggctctggaggaagctccgaagtcgagttttcccatgagtactggatgagacacgcattgactctcgcaaagagggctcgagatgaacgcgaggtgcccgtgggggcagtactcgtgctcaacaatcgcgtaatcggcgaaggttggaatagggcaatcggactccacgaccccactgcacatgcggaaatcatggcccttcgacagggagggcttgtgatgcagaattatcgactttatgatgcgacgctgtacgtcacgtttgaaccttgcgtaatgtgcgcgggagctatgattcactcccgcattggacgagttgtattcggtgttcgcaacgccaagacgggtgccgcaggttcactgatggacgtgctgcatcatccaggcatgaaccaccgggtagaaatcacagaaggcatattggcggacgaatgtgcggcgctgttgtgtcgtttttttcgcatgcccaggcgggtctttaacgcccagaaaaaagcacaatcctctactgacggctcttctggatctgaaacacctggcacaagcgagagcgccacccctgagagctctggcgagaacgagccctccgagaagtacctggaagtgttcaaggactaccagcggaagcaccctagagaggccggcgattacagcgtgtacgagttcctgtccaagaaagagaaccacttcatctggcggaatcaccctgagtacccctacctgtacgccaccttctgcgagatcgacaagaaaaagaaggacgccaagcagcaggccaccttcacactggccgatcctatcaatcaccctctgtgggtccgattcgaggaaagaagcggcagcaacctgaacaagtacagaatcctgaccgagcagctgcacaccgagaagctgaagaaaaagctgacagtgcagctggaccggctgatctaccctacagaatctggcggctgggaagagaagggcaaagtggacattgtgctgctgcccagccggcagttctacaaccagatcttcctggacatcgaggaaaagggcaagcacgccttcacctacaaggatgagagcatcaagttccctctgaagggcacactcggcggagccagagtgcagttcgacagagatcacctgagaagataccctcacaaggtggaaagcggcaacgtgggcagaatctacttcaacatgaccgtgaacatcgagcctacagagtccccagtgtccaagtctctgaagatccaccgggacgacttccccaaggtggtcaacttcaagcccaaagaactgaccgagtggatcaaggacagcaagggcaagaaactgaagtccggcatcgagtccctggaaatcggcctgagagtgatgagcatcgacctgggacagagacaggccgctgccgcctctattttcgaggtggtggatcagaagcccgacatcgaaggcaagctgtttttcccaatcaagggcaccgagctgtatgccgtgcacagagccagcttcaacatcaagctgcccggcgagacactggtcaagagcagagaagtgctgcggaaggccagagaggacaatctgaaactgatgaaccagaagctcaacttcctgcggaacgtgctgcacttccagcagttcgaggacatcaccgagagagagaagcgggtcaccaagtggatcagcagacaagagaacagcgacgtgcccctggtgtaccaggatgagctgatccagatccgcgagctgatgtacaagccttacaaggactgggtcgccttcctgaagcagctccacaagagactggaagtcgagatcggcaaagaagtgaagcactggcggaagtccctgagcgacggaagaaagggcctgtacggcatctccctgaagaacatcgacgagatcgatcggacccggaagttcctgctgagatggtccctgaggcctaccgaacctggcgaagtgcgtagactggaacccggccagagattcgccatcgaccagctgaatcacctgaacgccctgaaagaagatcggctgaagaagatggccaacaccatcatcatgcacgccctgggctactgctacgacgtgcggaagaagaaatggcaggctaagaaccccgcctgccagatcatcctgttcgaggatctgagcaactacaacccctacgaggaaaggtcccgcttcgagaacagcaagctcatgaagtggtccagacgcgagatccccagacaggttgcactgcagggcgagatctatggcctgcaagtgggagaagtgggcgctcagttcagcagcagattccacgccaagacaggcagccctggcatcagatgtagcgtcgtgaccaaagagaagctgcaggacaatcggttcttcaagaatctgcagagagagggcagactgaccctggacaaaatcgccgtgctgaaagagggcgatctgtacccagacaaaggcggcgagaagttcatcagcctgagcaaggatcggaagtgcgtgaccacacacgccgacatcaacgccgctcagaacctgcagaagcggttctggacaagaacccacggcttctacaaggtgtactgcaaggcctaccaggtggacggccagaccgtgtacatccctgagagcaaggaccagaagcagaagatcatcgaagagttcggcgagggctacttcattctgaaggacggggtgtacgaatgggtcaacgccggcaagctgaaaatcaagaagggcagctccaagcagagcagcagcgagctggtggatagcgacatcctgaaagacagcttcgacctggcctccgagctgaaaggcgaaaagctgatgctgtacagggaccccagcggcaatgtgttccccagcgacaaatggatggccgctggcgtgttcttcggaaagctggaacgcatcctgatcagcaagctgaccaaccagtactccatcagcaccatcgaggacgacagcagcaagcagtctatgaaaaggccggcggccacgaaaaaggccggccaggcaaaaaagaaaaagggatcctacccatacgatgttccagattacgcttatccctacgacgtgcctgattatgcatacccatatgatgtccccgactatgcctaa

SEQ ID NO: 7 - protein, 1361 aa, synthetic construct
  REGION 1..1361: note = BhCas12b GGSGGS-ABE8-Xten20at D306 polypeptide sequence
MAPKKKRKVGIHGVPAAATRSFILKIEPNEEVKKGLWKTHEVLNHGIAYYMNILKLIRQEAIYEHHEQDPKNPKKVSKAEIQAELWDFVLKMQKCNSFTHEVDKDEVFNILRELYEELVPSSVEKKGEANQLSNKFLYPLVDPNSQSGKGTASSGRKPRWYNLKIAGDPSWEEEKKKWEEDKKKDPLAKILGKLAEYGLIPLFIPYTDSNEPIVKEIKWMEKSRNQSVRRLDKDMFIQALERFLSWESWNLKVKEEYEKVEKEYKTLEERIKEDIQALKALEQYEKERQEQLLRDTLNTNEYRLSKRGLRGWREIIQKWLKMDGGSGGSSEVEFSHEYWMRHALTLAKRARDEREVPVGAVLVLNNRVIGEGWNRAIGLHDPTAHAEIMALRQGGLVMQNYRLYDATLYVTFEPCVMCAGAMIHSRIGRVVFGVRNAKTGAAGSLMDVLHHPGMNHRVEITEGILADECAALLCRFFRMPRRVFNAQKKAQSSTDGSSGSETPGTSESATPESSGENEPSEKYLEVFKDYQRKHPREAGDYSVYEFLSKKENHFIWRNHPEYPYLYATFCEIDKKKKDAKQQATFTLADPINHPLWVRFEERSGSNLNKYRILTEQLHTEKLKKKLTVQLDRLIYPTESGGWEEKGKVDIVLLPSRQFYNQIFLDIEEKGKHAFTYKDESIKFPLKGTLGGARVQFDRDHLRRYPHKVESGNVGRIYFNMTVNIEPTESPVSKSLKIHRDDFPKVVNFKPKELTEWIKDSKGKKLKSGIESLEIGLRVMSIDLGQRQAAAASIFEVVDQKPDIEGKLFFPIKGTELYAVHRASFNIKLPGETLVKSREVLRKAREDNLKLMNQKLNFLRNVLHFQQFEDITEREKRVTKWISRQENSDVPLVYQDELIQIRELMYKPYKDWVAFLKQLHKRLEVEIGKEVKHWRKSLSDGRKGLYGISLKNIDEIDRTRKFLLRWSLRPTEPGEVRRLEPGQRFAIDQLNHLNALKEDRLKKMANTIIMHALGYCYDVRKKKWQAKNPACQIILFEDLSNYNPYEERSRFENSKLMKWSRREIPRQVALQGEIYGLQVGEVGAQFSSRFHAKTGSPGIRCSVVTKEKLQDNRFFKNLQREGRLTLDKIAVLKEGDLYPDKGGEKFISLSKDRKCVTTHADINAAQNLQKRFWTRTHGFYKVYCKAYQVDGQTVYIPESKDQKQKIIEEFGEGYFILKDGVYEWVNAGKLKIKKGSSKQSSSELVDSDILKDSFDLASELKGEKLMLYRDPSGNVFPSDKWMAAGVFFGKLERILISKLTNQYSISTIEDDSSKQSMKRPAATKKAGQAKKKKGSYPYDVPDYAYPYDVPDYAYPYDVPDYA

SEQ ID NO: 8 - DNA, 4092 bp, synthetic construct
  misc_feature 1..4092: note = BhCas12b GGSGGS-ABE8-Xten20at D980 polynucleotide sequence
  misc_feature 1..6: note = Kozak sequence
  misc_feature 7..57: note = Sequence encoding N-terminal nuclear localization signal (NLS)
  misc_feature 58..2997: note = Sequence encoding BhCas12b
  misc_feature 2998..3015: note = Sequence encoding a linker
  misc_feature 3016..3513: note = Sequence encoding TadA*8
  misc_feature 3514..3573: note = Sequence encoding Xten20 linker
  misc_feature 3574..3954: note = Sequence encoding BhCas12b
  misc_feature 3955..4002: note = Sequence encoding C-terminal NLS
  misc_feature 4003..4008: note = Sequence encoding a GS linker
  misc_feature 4009..4089: note = Sequence encoding 3x hemagglutinin (HA) tag
  source 1..4092: mol_type = other DNA
gccaccatggccccaaagaagaagcggaaggtcggtatccacggagtcccagcagccgccaccagatccttcatcctgaagatcgagcccaacgaggaagtgaagaaaggcctctggaaaacccacgaggtgctgaaccacggaatcgcctactacatgaatatcctgaagctgatccggcaagaggccatctacgagcaccacgagcaggaccccaagaatcccaagaaggtgtccaaggccgagatccaggccgagctgtgggatttcgtgctgaagatgcagaagtgcaacagcttcacacacgaggtggacaaggacgaggtgttcaacatcctgagagagctgtacgaggaactggtgcccagcagcgtggaaaagaagggcgaagccaaccagctgagcaacaagtttctgtaccctctggtggaccccaacagccagtctggaaagggaacagccagcagcggcagaaagcccagatggtacaacctgaagattgccggcgatccctcctgggaagaagagaagaagaagtgggaagaagataagaaaaaggacccgctggccaagatcctgggcaagctggctgagtacggactgatccctctgttcatcccctacaccgacagcaacgagcccatcgtgaaagaaatcaagtggatggaaaagtcccggaaccagagcgtgcggcggctggataaggacatgttcattcaggccctggaacggttcctgagctgggagagctggaacctgaaagtgaaagaggaatacgagaaggtcgagaaagagtacaagaccctggaagagaggatcaaagaggacatccaggctctgaaggctctggaacagtatgagaaagagcggcaagaacagctgctgcgggacaccctgaacaccaacgagtaccggctgagcaagagaggccttagaggctggcgggaaatcatccagaaatggctgaaaatggacgagaacgagccctccgagaagtacctggaagtgttcaaggactaccagcggaagcaccctagagaggccggcgattacagcgtgtacgagttcctgtccaagaaagagaaccacttcatctggcggaatcaccctgagtacccctacctgtacgccaccttctgcgagatcgacaagaaaaagaaggacgccaagcagcaggccaccttcacactggccgatcctatcaatcaccctctgtgggtccgattcgaggaaagaagcggcagcaacctgaacaagtacagaatcctgaccgagcagctgcacaccgagaagctgaagaaaaagctgacagtgcagctggaccggctgatctaccctacagaatctggcggctgggaagagaagggcaaagtggacattgtgctgctgcccagccggcagttctacaaccagatcttcctggacatcgaggaaaagggcaagcacgccttcacctacaaggatgagagcatcaagttccctctgaagggcacactcggcggagccagagtgcagttcgacagagatcacctgagaagataccctcacaaggtggaaagcggcaacgtgggcagaatctacttcaacatgaccgtgaacatcgagcctacagagtccccagtgtccaagtctctgaagatccaccgggacgacttccccaaggtggtcaacttcaagcccaaagaactgaccgagtggatcaaggacagcaagggcaagaaactgaagtccggcatcgagtccctggaaatcggcctgagagtgatgagcatcgacctgggacagagacaggccgctgccgcctctattttcgaggtggtggatcagaagcccgacatcgaaggcaagctgtttttcccaatcaagggcaccgagctgtatgccgtgcacagagccagcttcaacatcaagctgcccggcgagacactggtcaagagcagagaagtgctgcggaaggccagagaggacaatctgaaactgatgaaccagaagctcaacttcctgcggaacgtgctgcacttccagcagttcgaggacatcaccgagagagagaagcgggtcaccaagtggatcagcagacaagagaacagcgacgtgcccctggtgtaccaggatgagctgatccagatccgcgagctgatgtacaagccttacaaggactgggtcgccttcctgaagcagctccacaagagactggaagtcgagatcggcaaagaagtgaagcactggcggaagtccctgagcgacggaagaaagggcctgtacggcatctccctgaagaacatcgacgagatcgatcggacccggaagttcctgctgagatggtccctgaggcctaccgaacctggcgaagtgcgtagactggaacccggccagagattcgccatcgaccagctgaatcacctgaacgccctgaaagaagatcggctgaagaagatggccaacaccatcatcatgcacgccctgggctactgctacgacgtgcggaagaagaaatggcaggctaagaaccccgcctgccagatcatcctgttcgaggatctgagcaactacaacccctacgaggaaaggtcccgcttcgagaacagcaagctcatgaagtggtccagacgcgagatccccagacaggttgcactgcagggcgagatctatggcctgcaagtgggagaagtgggcgctcagttcagcagcagattccacgccaagacaggcagccctggcatcagatgtagcgtcgtgaccaaagagaagctgcaggacaatcggttcttcaagaatctgcagagagagggcagactgaccctggacaaaatcgccgtgctgaaagagggcgatctgtacccagacaaaggcggcgagaagttcatcagcctgagcaaggatcggaagtgcgtgaccacacacgccgacatcaacgccgctcagaacctgcagaagcggttctggacaagaacccacggcttctacaaggtgtactgcaaggcctaccaggtggacggaggctctggaggaagctccgaagtcgagttttcccatgagtactggatgagacacgcattgactctcgcaaagagggctcgagatgaacgcgaggtgcccgtgggggcagtactcgtgctcaacaatcgcgtaatcggcgaaggttggaatagggcaatcggactccacgaccccactgcacatgcggaaatcatggcccttcgacagggagggcttgtgatgcagaattatcgactttatgatgcgacgctgtacgtcacgtttgaaccttgcgtaatgtgcgcgggagctatgattcactcccgcattggacgagttgtattcggtgttcgcaacgccaagacgggtgccgcaggttcactgatggacgtgctgcatcatccaggcatgaaccaccgggtagaaatcacagaaggcatattggcggacgaatgtgcggcgctgttgtgtcgtttttttcgcatgcccaggcgggtctttaacgcccagaaaaaagcacaatcctctactgacggctcttctggatctgaaacacctggcacaagcgagagcgccacccctgagagctctggcggccagaccgtgtacatccctgagagcaaggaccagaagcagaagatcatcgaagagttcggcgagggctacttcattctgaaggacggggtgtacgaatgggtcaacgccggcaagctgaaaatcaagaagggcagctccaagcagagcagcagcgagctggtggatagcgacatcctgaaagacagcttcgacctggcctccgagctgaaaggcgaaaagctgatgctgtacagggaccccagcggcaatgtgttccccagcgacaaatggatggccgctggcgtgttcttcggaaagctggaacgcatcctgatcagcaagctgaccaaccagtactccatcagcaccatcgaggacgacagcagcaagcagtctatgaaaaggccggcggccacgaaaaaggccggccaggcaaaaaagaaaaagggatcctacccatacgatgttccagattacgcttatccctacgacgtgcctgattatgcatacccatatgatgtccccgactatgcctaa

SEQ ID NO: 9 - protein, 1361 aa, synthetic construct
  REGION 1..1361: note = BhCas12b GGSGGS-ABE8-Xten20at D980 polypeptide sequence
MAPKKKRKVGIHGVPAAATRSFILKIEPNEEVKKGLWKTHEVLNHGIAYYMNILKLIRQEAIYEHHEQDPKNPKKVSKAEIQAELWDFVLKMQKCNSFTHEVDKDEVFNILRELYEELVPSSVEKKGEANQLSNKFLYPLVDPNSQSGKGTASSGRKPRWYNLKIAGDPSWEEEKKKWEEDKKKDPLAKILGKLAEYGLIPLFIPYTDSNEPIVKEIKWMEKSRNQSVRRLDKDMFIQALERFLSWESWNLKVKEEYEKVEKEYKTLEERIKEDIQALKALEQYEKERQEQLLRDTLNTNEYRLSKRGLRGWREIIQKWLKMDENEPSEKYLEVFKDYQRKHPREAGDYSVYEFLSKKENHFIWRNHPEYPYLYATFCEIDKKKKDAKQQATFTLADPINHPLWVRFEERSGSNLNKYRILTEQLHTEKLKKKLTVQLDRLIYPTESGGWEEKGKVDIVLLPSRQFYNQIFLDIEEKGKHAFTYKDESIKFPLKGTLGGARVQFDRDHLRRYPHKVESGNVGRIYFNMTVNIEPTESPVSKSLKIHRDDFPKVVNFKPKELTEWIKDSKGKKLKSGIESLEIGLRVMSIDLGQRQAAAASIFEVVDQKPDIEGKLFFPIKGTELYAVHRASFNIKLPGETLVKSREVLRKAREDNLKLMNQKLNFLRNVLHFQQFEDITEREKRVTKWISRQENSDVPLVYQDELIQIRELMYKPYKDWVAFLKQLHKRLEVEIGKEVKHWRKSLSDGRKGLYGISLKNIDEIDRTRKFLLRWSLRPTEPGEVRRLEPGQRFAIDQLNHLNALKEDRLKKMANTIIMHALGYCYDVRKKKWQAKNPACQIILFEDLSNYNPYEERSRFENSKLMKWSRREIPRQVALQGEIYGLQVGEVGAQFSSRFHAKTGSPGIRCSVVTKEKLQDNRFFKNLQREGRLTLDKIAVLKEGDLYPDKGGEKFISLSKDRKCVTTHADINAAQNLQKRFWTRTHGFYKVYCKAYQVDGGSGGSSEVEFSHEYWMRHALTLAKRARDEREVPVGAVLVLNNRVIGEGWNRAIGLHDPTAHAEIMALRQGGLVMQNYRLYDATLYVTFEPCVMCAGAMIHSRIGRVVFGVRNAKTGAAGSLMDVLHHPGMNHRVEITEGILADECAALLCRFFRMPRRVFNAQKKAQSSTDGSSGSETPGTSESATPESSGGQTVYIPESKDQKQKIIEEFGEGYFILKDGVYEWVNAGKLKIKKGSSKQSSSELVDSDILKDSFDLASELKGEKLMLYRDPSGNVFPSDKWMAAGVFFGKLERILISKLTNQYSISTIEDDSSKQSMKRPAATKKAGQAKKKKGSYPYDVPDYAYPYDVPDYAYPYDVPDYA

SEQ ID NO: 10 - DNA, 4092 bp, synthetic construct
  misc_feature 1..4092: note = BhCas12b GGSGGS-ABE8-Xten20at K1019 polynucleotide sequence
  misc_feature 1..6: note = Kozak sequence
  misc_feature 7..57: note = Sequence encoding N-terminal nuclear localization signal (NLS)
  misc_feature 58..3114: note = Sequence encoding BhCas12b
  misc_feature 3115..3132: note = Sequence encoding a linker
  misc_feature 3133..3630: note = Sequence encoding TadA*8
  misc_feature 3631..3690: note = Sequence encoding Xten20 linker
  misc_feature 3691..3954: note = Sequence encoding BhCas12b
  misc_feature 3955..4002: note = Sequence encoding C-terminal NLS
  misc_feature 4003..4008: note = Sequence encoding GS linker
  misc_feature 4009..4089: note = Sequence encoding 3x hemagglutinin (HA) tag
  source 1..4092: mol_type = other DNA
gccaccatggccccaaagaagaagcggaaggtcggtatccacggagtcccagcagccgccaccagatccttcatcctgaagatcgagcccaacgaggaagtgaagaaaggcctctggaaaacccacgaggtgctgaaccacggaatcgcctactacatgaatatcctgaagctgatccggcaagaggccatctacgagcaccacgagcaggaccccaagaatcccaagaaggtgtccaaggccgagatccaggccgagctgtgggatttcgtgctgaagatgcagaagtgcaacagcttcacacacgaggtggacaaggacgaggtgttcaacatcctgagagagctgtacgaggaactggtgcccagcagcgtggaaaagaagggcgaagccaaccagctgagcaacaagtttctgtaccctctggtggaccccaacagccagtctggaaagggaacagccagcagcggcagaaagcccagatggtacaacctgaagattgccggcgatccctcctgggaagaagagaagaagaagtgggaagaagataagaaaaaggacccgctggccaagatcctgggcaagctggctgagtacggactgatccctctgttcatcccctacaccgacagcaacgagcccatcgtgaaagaaatcaagtggatggaaaagtcccggaaccagagcgtgcggcggctggataaggacatgttcattcaggccctggaacggttcctgagctgggagagctggaacctgaaagtgaaagaggaatacgagaaggtcgagaaagagtacaagaccctggaagagaggatcaaagaggacatccaggctctgaaggctctggaacagtatgagaaagagcggcaagaacagctgctgcgggacaccctgaacaccaacgagtaccggctgagcaagagaggccttagaggctggcgggaaatcatccagaaatggctgaaaatggacgagaacgagccctccgagaagtacctggaagtgttcaaggactaccagcggaagcaccctagagaggccggcgattacagcgtgtacgagttcctgtccaagaaagagaaccacttcatctggcggaatcaccctgagtacccctacctgtacgccaccttctgcgagatcgacaagaaaaagaaggacgccaagcagcaggccaccttcacactggccgatcctatcaatcaccctctgtgggtccgattcgaggaaagaagcggcagcaacctgaacaagtacagaatcctgaccgagcagctgcacaccgagaagctgaagaaaaagctgacagtgcagctggaccggctgatctaccctacagaatctggcggctgggaagagaagggcaaagtggacattgtgctgctgcccagccggcagttctacaaccagatcttcctggacatcgaggaaaagggcaagcacgccttcacctacaaggatgagagcatcaagttccctctgaagggcacactcggcggagccagagtgcagttcgacagagatcacctgagaagataccctcacaaggtggaaagcggcaacgtgggcagaatctacttcaacatgaccgtgaacatcgagcctacagagtccccagtgtccaagtctctgaagatccaccgggacgacttccccaaggtggtcaacttcaagcccaaagaactgaccgagtggatcaaggacagcaagggcaagaaactgaagtccggcatcgagtccctggaaatcggcctgagagtgatgagcatcgacctgggacagagacaggccgctgccgcctctattttcgaggtggtggatcagaagcccgacatcgaaggcaagctgtttttcccaatcaagggcaccgagctgtatgccgtgcacagagccagcttcaacatcaagctgcccggcgagacactggtcaagagcagagaagtgctgcggaaggccagagaggacaatctgaaactgatgaaccagaagctcaacttcctgcggaacgtgctgcacttccagcagttcgaggacatcaccgagagagagaagcgggtcaccaagtggatcagcagacaagagaacagcgacgtgcccctggtgtaccaggatgagctgatccagatccgcgagctgatgtacaagccttacaaggactgggtcgccttcctgaagcagctccacaagagactggaagtcgagatcggcaaagaagtgaagcactggcggaagtccctgagcgacggaagaaagggcctgtacggcatctccctgaagaacatcgacgagatcgatcggacccggaagttcctgctgagatggtccctgaggcctaccgaacctggcgaagtgcgtagactggaacccggccagagattcgccatcgaccagctgaatcacctgaacgccctgaaagaagatcggctgaagaagatggccaacaccatcatcatgcacgccctgggctactgctacgacgtgcggaagaagaaatggcaggctaagaaccccgcctgccagatcatcctgttcgaggatctgagcaactacaacccctacgaggaaaggtcccgcttcgagaacagcaagctcatgaagtggtccagacgcgagatccccagacaggttgcactgcagggcgagatctatggcctgcaagtgggagaagtgggcgctcagttcagcagcagattccacgccaagacaggcagccctggcatcagatgtagcgtcgtgaccaaagagaagctgcaggacaatcggttcttcaagaatctgcagagagagggcagactgaccctggacaaaatcgccgtgctgaaagagggcgatctgtacccagacaaaggcggcgagaagttcatcagcctgagcaaggatcggaagtgcgtgaccacacacgccgacatcaacgccgctcagaacctgcagaagcggttctggacaagaacccacggcttctacaaggtgtactgcaaggcctaccaggtggacggccagaccgtgtacatccctgagagcaaggaccagaagcagaagatcatcgaagagttcggcgagggctacttcattctgaaggacggggtgtacgaatgggtcaacgccggcaagggaggctctggaggaagctccgaagtcgagttttcccatgagtactggatgagacacgcattgactctcgcaaagagggctcgagatgaacgcgaggtgcccgtgggggcagtactcgtgctcaacaatcgcgtaatcggcgaaggttggaatagggcaatcggactccacgaccccactgcacatgcggaaatcatggcccttcgacagggagggcttgtgatgcagaattatcgactttatgatgcgacgctgtacgtcacgtttgaaccttgcgtaatgtgcgcgggagctatgattcactcccgcattggacgagttgtattcggtgttcgcaacgccaagacgggtgccgcaggttcactgatggacgtgctgcatcatccaggcatgaaccaccgggtagaaatcacagaaggcatattggcggacgaatgtgcggcgctgttgtgtcgtttttttcgcatgcccaggcgggtctttaacgcccagaaaaaagcacaatcctctactgacggctcttctggatctgaaacacctggcacaagcgagagcgccacccctgagagctctggcctgaaaatcaagaagggcagctccaagcagagcagcagcgagctggtggatagcgacatcctgaaagacagcttcgacctggcctccgagctgaaaggcgaaaagctgatgctgtacagggaccccagcggcaatgtgttccccagcgacaaatggatggccgctggcgtgttcttcggaaagctggaacgcatcctgatcagcaagctgaccaaccagtactccatcagcaccatcgaggacgacagcagcaagcagtctatgaaaaggccggcggccacgaaaaaggccggccaggcaaaaaagaaaaagggatcctacccatacgatgttccagattacgcttatccctacgacgtgcctgattatgcatacccatatgatgtccccgactatgcctaa

SEQ ID NO: 11 - protein, 1361 aa, synthetic construct
  REGION 1..1361: note = BhCas12b GGSGGS-ABE8-Xten20at K1019 polypeptide sequence
MAPKKKRKVGIHGVPAAATRSFILKIEPNEEVKKGLWKTHEVLNHGIAYYMNILKLIRQEAIYEHHEQDPKNPKKVSKAEIQAELWDFVLKMQKCNSFTHEVDKDEVFNILRELYEELVPSSVEKKGEANQLSNKFLYPLVDPNSQSGKGTASSGRKPRWYNLKIAGDPSWEEEKKKWEEDKKKDPLAKILGKLAEYGLIPLFIPYTDSNEPIVKEIKWMEKSRNQSVRRLDKDMFIQALERFLSWESWNLKVKEEYEKVEKEYKTLEERIKEDIQALKALEQYEKERQEQLLRDTLNTNEYRLSKRGLRGWREIIQKWLKMDENEPSEKYLEVFKDYQRKHPREAGDYSVYEFLSKKENHFIWRNHPEYPYLYATFCEIDKKKKDAKQQATFTLADPINHPLWVRFEERSGSNLNKYRILTEQLHTEKLKKKLTVQLDRLIYPTESGGWEEKGKVDIVLLPSRQFYNQIFLDIEEKGKHAFTYKDESIKFPLKGTLGGARVQFDRDHLRRYPHKVESGNVGRIYFNMTVNIEPTESPVSKSLKIHRDDFPKVVNFKPKELTEWIKDSKGKKLKSGIESLEIGLRVMSIDLGQRQAAAASIFEVVDQKPDIEGKLFFPIKGTELYAVHRASFNIKLPGETLVKSREVLRKAREDNLKLMNQKLNFLRNVLHFQQFEDITEREKRVTKWISRQENSDVPLVYQDELIQIRELMYKPYKDWVAFLKQLHKRLEVEIGKEVKHWRKSLSDGRKGLYGISLKNIDEIDRTRKFLLRWSLRPTEPGEVRRLEPGQRFAIDQLNHLNALKEDRLKKMANTIIMHALGYCYDVRKKKWQAKNPACQIILFEDLSNYNPYEERSRFENSKLMKWSRREIPRQVALQGEIYGLQVGEVGAQFSSRFHAKTGSPGIRCSVVTKEKLQDNRFFKNLQREGRLTLDKIAVLKEGDLYPDKGGEKFISLSKDRKCVTTHADINAAQNLQKRFWTRTHGFYKVYCKAYQVDGQTVYIPESKDQKQKIIEEFGEGYFILKDGVYEWVNAGKGGSGGSSEVEFSHEYWMRHALTLAKRARDEREVPVGAVLVLNNRVIGEGWNRAIGLHDPTAHAEIMALRQGGLVMQNYRLYDATLYVTFEPCVMCAGAMIHSRIGRVVFGVRNAKTGAAGSLMDVLHHPGMNHRVEITEGILADECAALLCRFFRMPRRVFNAQKKAQSSTDGSSGSETPGTSESATPESSGLKIKKGSSKQSSSELVDSDILKDSFDLASELKGEKLMLYRDPSGNVFPSDKWMAAGVFFGKLERILISKLTNQYSISTIEDDSSKQSMKRPAATKKAGQAKKKKGSYPYDVPDYAYPYDVPDYAYPYDVPDYA

SEQ ID NO: 12 - protein, 208 aa, Petromyzon marinus
  REGION 1..208: note = MISC_FEATURE - tr|A5H718|A5H718_PETMA Cytosine deaminase OS=Petromyzon marinusOX=7757 PE=2 SV=1 amino acid sequence; PmCDA1 polypeptide sequence
MTDAEYVRIHEKLDIYTFKKQFFNNKKSVSHRCYVLFELKRRGERRACFWGYAVNKPQSGTERGIHAEIFSIRKVEEYLRDNPGQFTINWYSSWSPCADCAEKILEWYNQELRGNGHTLKIWACKLYYEKNARNQIGLWNLRDNGVGLNVMVSEHYQCCRKIFIQSSHNQLNENRWLEKTLKRAEKRRSELSIMIQVKILHTTKSPAV

SEQ ID NO: 13 - DNA, 766 bp, Petromyzon marinus
  misc_feature 1..766: note = EF094822.1 Petromyzon marinus isolate PmCDA.21 cytosine deaminase mRNA, complete cds; PmCDA1 polynucleotide sequence
  source 1..766: mol_type = genomic DNA
tgacacgacacagccgtgtatatgaggaagggtagctggatggggggggggggaatacgttcagagaggacattagcgagcgtcttgttggtggccttgagtctagacacctgcagacatgaccgacgctgagtacgtgagaatccatgagaagttggacatctacacgtttaagaaacagtttttcaacaacaaaaaatccgtgtcgcatagatgctacgttctctttgaattaaaacgacggggtgaacgtagagcgtgtttttggggctatgctgtgaataaaccacagagcgggacagaacgtggaattcacgccgaaatctttagcattagaaaagtcgaagaatacctgcgcgacaaccccggacaattcacgataaattggtactcatcctggagtccttgtgcagattgcgctgaaaagatcttagaatggtataaccaggagctgcgggggaacggccacactttgaaaatctgggcttgcaaactctattacgagaaaaatgcgaggaatcaaattgggctgtggaacctcagagataacggggttgggttgaatgtaatggtaagtgaacactaccaatgttgcaggaaaatattcatccaatcgtcgcacaatcaattgaatgagaatagatggcttgagaagactttgaagcgagctgaaaaacgacggagcgagttgtccattatgattcaggtaaaaatactccacaccactaagagtcctgctgtttaagaggctatgcggatggttttc

SEQ ID NO: 14 - protein, 145 aa, Homo sapiens
  REGION 1..145: note = MISC_FEATURE - tr|Q6QJ80|Q6QJ80_HUMAN Activation-induced cytidine deaminase OS=Homo sapiens; OX = 9606 GN=AICDA PE=2 SV=1; AID polypeptide sequence
MDSLLMNRRKFLYQFKNVRWAKGRRETYLCYVVKRRDSATSFSLDFGYLRNKNGCHVELLFLRYISDWDLDPGRCYRVTWFTSWSPCYDCARHVADFLRGNPNLSLRIFTARLYFCEDRKAEPEGLRRLHRAGVQIAIMTFKAPV

SEQ ID NO: 15 - DNA, 10681 bp, Homo sapiens
  misc_feature 1..10681: note = NG_011588.1:5001-15681 Homo sapiens activation induced cytidine deaminase (AICDA), RefSeqGene (LRG_17) on chromosome 12; nucleic acid sequence of the CDS of human AID; polynucleotide sequence
  source 1..10681: mol_type = genomic DNA
agagaaccatcattaattgaagtgagatttttctggcctgagacttgcagggaggcaagaagacactctggacaccactatggacaggtaaagaggcagtcttctcgtgggtgattgcactggccttcctctcagagcaaatctgagtaatgagactggtagctatccctttctctcatgtaactgtctgactgataagatcagcttgatcaatatgcatatatattttttgatctgtctccttttcttctattcagatcttatacgctgtcagcccaattctttctgtttcagacttctcttgatttccctctttttcatgtggcaaaagaagtagtgcgtacaatgtactgattcgtcctgagatttgtaccatggttgaaactaatttatggtaataatattaacatagcaaatctttagagactcaaatcatgaaaaggtaatagcagtactgtactaaaaacggtagtgctaattttcgtaataattttgtaaatattcaacagtaaaacaacttgaagacacactttcctagggaggcgttactgaaataatttagctatagtaagaaaatttgtaattttagaaatgccaagcattctaaattaattgcttgaaagtcactatgattgtgtccattataaggagacaaattcattcaagcaagttatttaatgttaaaggcccaattgttaggcagttaatggcacttttactattaactaatctttccatttgttcagacgtagcttaacttacctcttaggtgtgaatttggttaaggtcctcataatgtctttatgtgcagtttttgataggttattgtcatagaacttattctattcctacatttatgattactatggatgtatgagaataacacctaatccttatactttacctcaatttaactcctttataaagaacttacattacagaataaagattttttaaaaatatatttttttgtagagacagggtcttagcccagccgaggctggtctctaagtcctggcccaagcgatcctcctgcctgggcctcctaaagtgctggaattatagacatgagccatcacatccaatatacagaataaagatttttaatggaggatttaatgttcttcagaaaattttcttgaggtcagacaatgtcaaatgtctcctcagtttacactgagattttgaaaacaagtctgagctataggtccttgtgaagggtccattggaaatacttgttcaaagtaaaatggaaagcaaaggtaaaatcagcagttgaaattcagagaaagacagaaaaggagaaaagatgaaattcaacaggacagaagggaaatatattatcattaaggaggacagtatctgtagagctcattagtgatggcaaaatgacttggtcaggattatttttaacccgcttgtttctggtttgcacggctggggatgcagctagggttctgcctcagggagcacagctgtccagagcagctgtcagcctgcaagcctgaaacactccctcggtaaagtccttcctactcaggacagaaatgacgagaacagggagctggaaacaggcccctaaccagagaagggaagtaatggatcaacaaagttaactagcaggtcaggatcacgcaattcatttcactctgactggtaacatgtgacagaaacagtgtaggcttattgtattttcatgtagagtaggacccaaaaatccacccaaagtcctttatctatgccacatccttcttatctatacttccaggacactttttcttccttatgataaggctctctctctctccacacacacacacacacacacacacacacacacacacacacacacaaacacacaccccgccaaccaaggtgcatgtaaaaagatgtagattcctctgcctttctcatctacacagcccaggagggtaagttaatataagagggatttattggtaagagatgatgcttaatctgtttaacactgggcctcaaagagagaatttcttttcttctgtacttattaagcacctattatgtgttgagcttatatatacaaagggttattatatgctaatatagtaatagtaatggtggttggtactatggtaattaccataaaaattattatccttttaaaataaagctaattattattggatcttttttagtattcattttatgttttttatgtttttgattttttaaaagacaatctcaccctgttacccaggctggagtgcagtggtgcaatcatagctttctgcagtcttgaactcctgggctcaagcaatcctcctgccttggcctcccaaagtgttgggatacagtcatgagccactgcatctggcctaggatccatttagattaaaatatgcattttaaattttaaaataatatggctaatttttaccttatgtaatgtgtatactggcaataaatctagtttgctgcctaaagtttaaagtgctttccagtaagcttcatgtacgtgaggggagacatttaaagtgaaacagacagccaggtgtggtggctcacgcctgtaatcccagcactctgggaggctgaggtgggtggatcgcttgagccctggagttcaagaccagcctgagcaacatggcaaaacgctgtttctataacaaaaattagccgggcatggtggcatgtgcctgtggtcccagctactagggggctgaggcaggagaatcgttggagcccaggaggtcaaggctgcactgagcagtgcttgcgccactgcactccagcctgggtgacaggaccagaccttgcctcaaaaaaataagaagaaaaattaaaaataaatggaaacaactacaaagagctgttgtcctagatgagctacttagttaggctgatattttggtatttaacttttaaagtcagggtctgtcacctgcactacattattaaaatatcaattctcaatgtatatccacacaaagactggtacgtgaatgttcatagtacctttattcacaaaaccccaaagtagagactatccaaatatccatcaacaagtgaacaaataaacaaaatgtgctatatccatgcaatggaataccaccctgcagtacaaagaagctacttggggatgaatcccaaagtcatgacgctaaatgaaagagtcagacatgaaggaggagataatgtatgccatacgaaattctagaaaatgaaagtaacttatagttacagaaagcaaatcagggcaggcatagaggctcacacctgtaatcccagcactttgagaggccacgtgggaagattgctagaactcaggagttcaagaccagcctgggcaacacagtgaaactccattctccacaaaaatgggaaaaaaagaaagcaaatcagtggttgtcctgtggggaggggaaggactgcaaagagggaagaagctctggtggggtgagggtggtgattcaggttctgtatcctgactgtggtagcagtttggggtgtttacatccaaaaatattcgtagaattatgcatcttaaatgggtggagtttactgtatgtaaattatacctcaatgtaagaaaaaataatgtgtaagaaaactttcaattctcttgccagcaaacgttattcaaattcctgagccctttacttcgcaaattctctgcacttctgccccgtaccattaggtgacagcactagctccacaaattggataaatgcatttctggaaaagactagggacaaaatccaggcatcacttgtgctttcatatcaaccatgctgtacagcttgtgttgctgtctgcagctgcaatggggactcttgatttctttaaggaaacttgggttaccagagtatttccacaaatgctattcaaattagtgcttatgatatgcaagacactgtgctaggagccagaaaacaaagaggaggagaaatcagtcattatgtgggaacaacatagcaagatatttagatcattttgactagttaaaaaagcagcagagtacaaaatcacacatgcaatcagtataatccaaatcatgtaaatatgtgcctgtagaaagactagaggaataaacacaagaatcttaacagtcattgtcattagacactaagtctaattattattattagacactatgatatttgagatttaaaaaatctttaatattttaaaatttagagctcttctatttttccatagtattcaagtttgacaatgatcaagtattactctttctttttttttttttttttttttttttgagatggagttttggtcttgttgcccatgctggagtggaatggcatgaccatagctcactgcaacctccacctcctgggttcaagcaaagctgtcgcctcagcctcccgggtagatgggattacaggcgcccaccaccacactcggctaatgtttgtatttttagtagagatggggtttcaccatgttggccaggctggtctcaaactcctgacctcagaggatccacctgcctcagcctcccaaagtgctgggattacagatgtaggccactgcgcccggccaagtattgctcttatacattaaaaaacaggtgtgagccactgcgcccagccaggtattgctcttatacattaaaaaataggccggtgcagtggctcacgcctgtaatcccagcactttgggaagccaaggcgggcagaacacccgaggtcaggagtccaaggccagcctggccaagatggtgaaaccccgtctctattaaaaatacaaacattacctgggcatgatggtgggcgcctgtaatcccagctactcaggaggctgaggcaggaggatccgcggagcctggcagatctgcctgagcctgggaggttgaggctacagtaagccaagatcatgccagtatacttcagcctgggcgacaaagtgagaccgtaacaaaaaaaaaaaaatttaaaaaaagaaatttagatcaagatccaactgtaaaaagtggcctaaacaccacattaaagagtttggagtttattctgcaggcagaagagaaccatcagggggtcttcagcatgggaatggcatggtgcacctggtttttgtgagatcatggtggtgacagtgtggggaatgttattttggagggactggaggcagacagaccggttaaaaggccagcacaacagataaggaggaagaagatgagggcttggaccgaagcagagaagagcaaacagggaaggtacaaattcaagaaatattggggggtttgaatcaacacatttagatgattaattaaatatgaggactgaggaataagaaatgagtcaaggatggttccaggctgctaggctgcttacctgaggtggcaaagtcgggaggagtggcagtttaggacagggggcagttgaggaatattgttttgatcattttgagtttgaggtacaagttggacacttaggtaaagactggaggggaaatctgaatatacaattatgggactgaggaacaagtttattttattttttgtttcgttttcttgttgaagaacaaatttaattgtaatcccaagtcatcagcatctagaagacagtggcaggaggtgactgtcttgtgggtaagggtttggggtccttgatgagtatctctcaattggccttaaatataagcaggaaaaggagtttatgatggattccaggctcagcagggctcaggagggctcaggcagccagcagaggaagtcagagcatcttctttggtttagcccaagtaatgacttccttaaaaagctgaaggaaaatccagagtgaccagattataaactgtactcttgcattttctctccctcctctcacccacagcctcttgatgaaccggaggaagtttctttaccaattcaaaaatgtccgctgggctaagggtcggcgtgagacctacctgtgctacgtagtgaagaggcgtgacagtgctacatccttttcactggactttggttatcttcgcaataaggtatcaattaaagtcggctttgcaagcagtttaatggtcaactgtgagtgcttttagagccacctgctgatggtattacttccatccttttttggcatttgtgtctctatcacattcctcaaatccttttttttatttctttttccatgtccatgcacccatattagacatggcccaaaatatgtgatttaattcctccccagtaatgctgggcaccctaataccactccttccttcagtgccaagaacaactgctcccaaactgtttaccagctttcctcagcatctgaattgcctttgagattaattaagctaaaagcatttttatatgggagaatattatcagcttgtccaagcaaaaattttaaatgtgaaaaacaaattgtgtcttaagcatttttgaaaattaaggaagaagaatttgggaaaaaattaacggtggctcaattctgtcttccaaatgatttcttttccctcctactcacatgggtcgtaggccagtgaatacattcaacatggtgatccccagaaaactcagagaagcctcggctgatgattaattaaattgatctttcggctacccgagagaattacatttccaagagacttcttcaccaaaatccagatgggtttacataaacttctgcccacgggtatctcctctctcctaacacgctgtgacgtctgggcttggtggaatctcagggaagcatccgtggggtggaaggtcatcgtctggctcgttgtttgatggttatattaccatgcaattttctttgcctacatttgtattgaatacatcccaatctccttcctattcggtgacatgacacattctatttcagaaggctttgattttatcaagcactttcatttacttctcatggcagtgcctattacttctcttacaatacccatctgtctgctttaccaaaatctatttccccttttcagatcctcccaaatggtcctcataaactgtcctgcctccacctagtggtccaggtatatttccacaatgttacatcaacaggcacttctagccattttccttctcaaaaggtgcaaaaagcaacttcataaacacaaattaaatcttcggtgaggtagtgtgatgctgcttcctcccaactcagcgcacttcgtcttcctcattccacaaaaacccatagccttccttcactctgcaggactagtgctgccaagggttcagctctacctactggtgtgctcttttgagcaagttgcttagcctctctgtaacacaaggacaatagctgcaagcatccccaaagatcattgcaggagacaatgactaaggctaccagagccgcaataaaagtcagtgaattttagcgtggtcctctctgtctctccagaacggctgccacgtggaattgctcttcctccgctacatctcggactgggacctagaccctggccgctgctaccgcgtcacctggttcacctcctggagcccctgctacgactgtgcccgacatgtggccgactttctgcgagggaaccccaacctcagtctgaggatcttcaccgcgcgcctctacttctgtgaggaccgcaaggctgagcccgaggggctgcggcggctgcaccgcgccggggtgcaaatagccatcatgaccttcaaaggtgcgaaagggccttccgcgcaggcgcagtgcagcagcccgcattcgggattgcgatgcggaatgaatgagttagtggggaagctcgaggggaagaagtgggcggggattctggttcacctctggagccgaaattaaagattagaagcagagaaaagagtgaatggctcagagacaaggccccgaggaaatgagaaaatggggccagggttgcttctttcccctcgatttggaacctgaactgtcttctacccccatatccccgcctttttttcctttttttttttttgaagattatttttactgctggaatacttttgtagaaaaccacgaaagaactttcaaagcctgggaagggctgcatgaaaattcagttcgtctctccagacagcttcggcgcatccttttggtaaggggcttcctcgctttttaaattttctttctttctctacagtcttttttggagtttcgtatatttcttatattttcttattgttcaatcactctcagttttcatctgatgaaaactttatttctcctccacatcagctttttcttctgctgtttcaccattcagagccctctgctaaggttccttttccctcccttttctttcttttgttgtttcacatctttaaatttctgtctctccccagggttgcgtttccttcctggtcagaattcttttctcctttttttttttttttttttttttttttaaacaaacaaacaaaaaacccaaaaaaactctttcccaatttactttcttccaacatgttacaaagccatccactcagtttagaagactctccggccccaccgacccccaacctcgttttgaagccattcactcaatttgcttctctctttctctacagcccctgtatgaggttgatgacttacgagacgcatttcgtactttgggactttgatagcaacttccaggaatgtcacacacgatgaaatatctctgctgaagacagtggataaaaaacagtccttcaagtcttctctgtttttattcttcaactctcactttcttagagtttacagaaaaaatatttatatacgactctttaaaaagatctatgtcttgaaaatagagaaggaacacaggtctggccagggacgtgctgcaattggtgcagttttgaatgcaacattgtcccctactgggaataacagaactgcaggacctgggagcatcctaaagtgtcaacgtttttctatgacttttaggtaggatgagagcagaaggtagatcctaaaaagcatggtgagaggatcaaatgtttttatatcaacatcctttattatttgattcatttgagttaacagtggtgttagtgatagatttttctattcttttcccttgacgtttactttcaagtaacacaaactcttccatcaggccatgatctataggacctcctaatgagagtatctgggtgattgtgaccccaaaccatctctccaaagcattaatatccaatcatgcgctgtatgttttaatcagcagaagcatgtttttatgtttgtacaaaagaagattgttatgggtggggatggaggtatagaccatgcatggtcaccttcaagctactttaataaaggatcttaaaatgggcaggaggactgtgaacaagacaccctaataatgggttgatgtctgaagtagcaaatcttctggaaacgcaaactcttttaaggaagtccctaatttagaaacacccacaaacttcacatatcataattagcaaacaattggaaggaagttgcttgaatgttggggagaggaaaatctattggctctcgtgggtctcttcatctcagaaatgccaatcaggtcaaggtttgctacattttgtatgtgtgtgatgcttctcccaaaggtatattaactatataagagagttgtgacaaaacagaatgataaagctgcgaaccgtggcacacgctcatagttctagctgcttgggaggttgaggagggaggatggcttgaacacaggtgttcaaggccagcctgggcaacataacaagatcctgtctctcaaaaaaaaaaaaaaaaaaaagaaagagagagggccgggcgtggtggctcacgcctgtaatcccagcactttgggaggccgagccgggcggatcacctgtggtcaggagtttgagaccagcctggccaacatggcaaaaccccgtctgtactcaaaatgcaaaaattagccaggcgtggtagcaggcacctgtaatcccagctacttgggaggctgaggcaggagaatcgcttgaacccaggaggtggaggttgcagtaagctgagatcgtgccgttgcactccagcctgggcgacaagagcaagactctgtctcagaaaaaaaaaaaaaaaagagagagagagagaaagagaacaatatttgggagagaaggatggggaagcattgcaaggaaattgtgctttatccaacaaaatgtaaggagccaataagggatccctatttgtctcttttggtgtctatttgtccctaacaactgtctttgacagtgagaaaaatattcagaataaccatatccctgtgccgttattacctagcaacccttgcaatgaagatgagcagatccacaggaaaacttgaatgcacaactgtcttattttaatcttattgtacataagtttgtaaaagagttaaaaattgttacttcatgtattcatttatattttatattattttgcgtctaatgattttttattaacatgatttccttttctgatatattgaaatggagtctcaaagcttcataaatttataactttagaaatgattctaataacaacgtatgtaattgtaacattgcagtaatggtgctacgaagccatttctcttgatttttagtaaacttttatgacagcaaatttgcttctggctcactttcaatcagttaaataaatgataaataattttggaagctgtgaagataaaataccaaataaaataatataaaagtgatttatatgaagttaaaataaaaaatcagtatgatggaataaacttg

SEQ ID NO: 16 - protein, 198 aa, Homo sapiens [sequence omitted]

SEQ ID NO: 17 - protein, 198 aa, Canis lupus
  REGION 1..198: note = MISC_FEATURE - Canine AID (clAID) polypeptide sequence
  REGION 1..30: note = MISC_FEATURE - Nuclear localization sequence
  REGION 183..198: note = MISC_FEATURE - Nuclear export signal
MDSLLMKQRKFLYHFKNVRWAKGRHETYLCYVVKRRDSATSFSLDFGHLRNKSGCHVELLFLRYISDWDLDPGRCYRVTWFTSWSPCYDCARHVADFLRGYPNLSLRIFAARLYFCEDRKAEPEGLRRLHRAGVQIAIMTFKDYFYCWNTFVENREKTFKAWEGLHENSVRLSRQLRRILLPLYEVDDLRDAFRTLGL

SEQ ID NO: 18 - protein, 199 aa, Bos taurus
  REGION 1..199: note = MISC_FEATURE - Bovine AID (btAID) polypeptide sequence
  REGION 1..30: note = MISC_FEATURE - Nuclear localization sequence
  REGION 183..199: note = MISC_FEATURE - Nuclear export signal
MDSLLKKQRQFLYQFKNVRWAKGRHETYLCYVVKRRDSPTSFSLDFGHLRNKAGCHVELLFLRYISDWDLDPGRCYRVTWFTSWSPCYDCARHVADFLRGYPNLSLRIFTARLYFCDKERKAEPEGLRRLHRAGVQIAIMTFKDYFYCWNTFVENHERTFKAWEGLHENSVRLSRQLRRILLPLYEVDDLRDAFRTLGL

SEQ ID NO: 19 - protein, 239 aa, Rattus sp.
  REGION 1..239: note = MISC_FEATURE - Rat AID polypeptide sequence
  REGION 1..26: note = MISC_FEATURE - Nuclear localization sequence
  REGION 194..239: note = MISC_FEATURE - Nuclear export signal
MAVGSKPKAALVGPHWERERIWCFLCSTGLGTQQTGQTSRWLRPAATQDPVSPPRSLLMKQRKFLYHFKNVRWAKGRHETYLCYVVKRRDSATSFSLDFGYLRNKSGCHVELLFLRYISDWDLDPGRCYRVTWFTSWSPCYDCARHVADFLRGNPNLSLRIFTARLTGWGALPAGLMSPARPSDYFYCWNTFVENHERTFKAWEGLHENSVRLSRRLRRILLPLYEVDDLRDAFRTLGL

SEQ ID NO: 20 - protein, 198 aa, Mus musculus [sequence omitted]

SEQ ID NO: 21 - protein, 229 aa, Rattus norvegicus [sequence omitted]

SEQ ID NO: 22 - protein, 229 aa, Mesocricetus auratus
  REGION 1..229: note = MISC_FEATURE - maAPOBEC-1 polypeptide sequence
MSSETGPVVVDPTLRRRIEPHEFDAFFDQGELRKETCLLYEIRWGGRHNIWRHTGQNTSRHVEINFIEKFTSERYFYPSTRCSIVWFLSWSPCGECSKAITEFLSGHPNVTLFIYAARLYHHTDQRNRQGLRDLISRGVTIRIMTEQEYCYCWRNFVNYPPSNEVYWPRYPNLWMRLYALELYCIHLGLPPCLKIKRRHQYPLTFFRLNLQSCHYQRIPPHILWATGFI

SEQ ID NO: 23 - protein, 236 aa, Pongo pygmaeus
  REGION 1..236: note = MISC_FEATURE - ppAPOBEC-1 polypeptide sequence
MTSEKGPSTGDPTLRRRIESWEFDVFYDPRELRKETCLLYEIKWGMSRKIWRSSGKNTTNHVEVNFIKKFTSERRFHSSISCSITWFLSWSPCWECSQAIREFLSQHPGVTLVIYVARLFWHMDQRNRQGLRDLVNSGVTIQIMRASEYYHCWRNFVNYPPGDEAHWPQYPPLWMMLYALELHCIILSLPPCLKISRRWQNHLAFFRLHLQNCHYQTIPPHILLATGLIHPSVTWR

SEQ ID NO: 24 - protein, 236 aa, Oryctolagus cuniculus
  REGION 1..236: note = MISC_FEATURE - ocAPOBEC1 polypeptide sequence
MASEKGPSNKDYTLRRRIEPWEFEVFFDPQELRKEACLLYEIKWGASSKTWRSSGKNTTNHVEVNFLEKLTSEGRLGPSTCCSITWFLSWSPCWECSMAIREFLSQHPGVTLIIFVARLFQHMDRRNRQGLKDLVTSGVTVRVMSVSEYCYCWENFVNYPPGKAAQWPRYPPRWMLMYALELYCIILGLPPCLKISRRHQKQLTFFSLTPQYCHYKMIPPYILLATGLLQPSVPWR

SEQ ID NO: 25 - protein, 235 aa, Monodelphis domestica
  REGION 1..235: note = MISC_FEATURE - mdAPOBEC-1 polypeptide sequence
MNSKTGPSVGDATLRRRIKPWEFVAFFNPQELRKETCLLYEIKWGNQNIWRHSNQNTSQHAEINFMEKFTAERHFNSSVRCSITWFLSWSPCWECSKAIRKFLDHYPNVTLAIFISRLYWHMDQQHRQGLKELVHSGVTIQIMSYSEYHYCWRNFVDYPQGEEDYWPKYPYLWIMLYVLELHCIILGLPPCLKISGSHSNQLALFSLDLQDCHYQKIPYNVLVATGLVQPFVTWR

SEQ ID NO: 26 - protein, 224 aa, Pongo pygmaeus
  REGION 1..224: note = MISC_FEATURE - ppAPOBEC-2 polypeptide sequence
MAQKEEAAAATEAASQNGEDLENLDDPEKLKELIELPPFEIVTGERLPANFFKFQFRNVEYSSGRNKTFLCYVVEAQGKGGQVQASRGYLEDEHAAAHAEEAFFNTILPAFDPALRYNVTWYVSSSPCAACADRIIKTLSKTKNLRLLILVGRLFMWEELEIQDALKKLKEAGCKLRIMKPQDFEYVWQNFVEQEEGESKAFQPWEDIQENFLYYEEKLADILK

SEQ ID NO: 27 - protein, 224 aa, Bos taurus
  REGION 1..224: note = MISC_FEATURE - btAPOBEC-2 polypeptide sequence
MAQKEEAAAAAEPASQNGEEVENLEDPEKLKELIELPPFEIVTGERLPAHYFKFQFRNVEYSSGRNKTFLCYVVEAQSKGGQVQASRGYLEDEHATNHAEEAFFNSIMPTFDPALRYMVTWYVSSSPCAACADRIVKTLNKTKNLRLLILVGRLFMWEEPEIQAALRKLKEAGCRLRIMKPQDFEYIWQNFVEQEEGESKAFEPWEDIQENFLYYEEKLADILK

SEQ ID NO: 28 - protein, 440 aa, Mus musculus
  REGION 1..440: note = MISC_FEATURE - mAPOBEC-3-(1) polypeptide sequence
MQPQRLGPRAGMGPFCLGCSHRKCYSPIRNLISQETFKFHFKNLGYAKGRKDTFLCYEVTRKDCDSPVSLHHGVFKNKDNIHAEICFLYWFHDKVLKVLSPREEFKITWYMSWSPCFECAEQIVRFLATHHNLSLDIFSSRLYNVQDPETQQNLCRLVQEGAQVAAMDLYEFKKCWKKFVDNGGRRFRPWKRLLTNFRYQDSKLQEILRPCYISVPSSSSSTLSNICLTKGLPETRFWVEGRRMDPLSEEEFYSQFYNQRVKHLCYYHRMKPYLCYQLEQFNGQAPLKGCLLSEKGKQHAEILFLDKIRSMELSQVTITCYLTWSPCPNCAWQLAAFKRDRPDLILHIYTSRLYFHWKRPFQKGLCSLWQSGILVDVMDLPQFTDCWTNFVNPKRPFWPWKGLEIISRRTQRRLRRIKESWGLQDLVNDFGNLQLGPPMS

SEQ ID NO: 29 - protein, 429 aa, Mus musculus
  REGION 1..429: note = MISC_FEATURE - APOBEC-3-(2) (Mouse APOBEC-3) polypeptide sequence
  REGION 71..108: note = MISC_FEATURE - Nucleic acid editing domain
  REGION 288..319: note = MISC_FEATURE - Nucleic acid editing domain
MGPFCLGCSHRKCYSPIRNLISQETFKFHFKNLGYAKGRKDTFLCYEVTRKDCDSPVSLHHGVFKNKDNIHAEICFLYWFHDKVLKVLSPREEFKITWYMSWSPCFECAEQIVRFLATHHNLSLDIFSSRLYNVQDPETQQNLCRLVQEGAQVAAMDLYEFKKCWKKFVDNGGRRFRPWKRLLTNFRYQDSKLQEILRPCYIPVPSSSSSTLSNICLTKGLPETRFCVEGRRMDPLSEEEFYSQFYNQRVKHLCYYHRMKPYLCYQLEQFNGQAPLKGCLLSEKGKQHAEILFLDKIRSMELSQVTITCYLTWSPCPNCAWQLAAFKRDRPDLILHIYTSRLYFHWKRPFQKGLCSLWQSGILVDVMDLPQFTDCWTNFVNPKRPFWPWKGLEIISRRTQRRLRRIKESWGLQDLVNDFGNLQLGPPMS

SEQ ID NO: 30 - protein, 430 aa, Rattus sp.
  REGION 1..430: note = MISC_FEATURE - APOBEC-3 polypeptide sequence
  REGION 72..109: note = MISC_FEATURE - Nucleic acid editing domain
  REGION 289..320: note = MISC_FEATURE - Nucleic acid editing domain
MGPFCLGCSHRKCYSPIRNLISQETFKFHFKNRLRYAIDRKDTFLCYEVTRKDCDSPVSLHHGVFKNKDNIHAEICFLYWFHDKVLKVLSPREEFKITWYMSWSPCFECAEQVLRFLATHHNLSLDIFSSRLYNIRDPENQQNLCRLVQEGAQVAAMDLYEFKKCWKKFVDNGGRRFRPWKKLLTNFRYQDSKLQEILRPCYIPVPSSSSSTLSNICLTKGLPETRFCVERRRVHLLSEEEFYSQFYNQRVKHLCYYHGVKPYLCYQLEQFNGQAPLKGCLLSEKGKQHAEILFLDKIRSMELSQVIITCYLTWSPCPNCAWQLAAFKRDRPDLILHIYTSRLYFHWKRPFQKGLCSLWQSGILVDVMDLPQFTDCWTNFVNPKRPFWPWKGLEIISRRTQRRLHRIKESWGLQDLVNDFGNLQLGPPMS

SEQ ID NO: 31 - protein, 199 aa, Homo sapiens
  REGION 1..199: note = MISC_FEATURE - hAPOBEC-3A polypeptide sequence
  REGION 70..106: note = MISC_FEATURE - Nucleic acid editing domain
MEASPASGPRHLMDPHIFTSNFNNGIGRHKTYLCYEVERLDNGTSVKMDQHRGFLHNQAKNLLCGFYGRHAELRFLDLVPSLQLDPAQIYRVTWFISWSPCFSWGCAGEVRAFLQENTHVRLRIFAARIYDYDPLYKEALQMLRDAGAQVSIMTYDEFKHCWDTFVDHQGCPFQPWDGLDEHSQALSGRLRAILQNQGN

SEQ ID NO: 32 - protein, 373 aa, Homo sapiens
  REGION 1..373: note = MISC_FEATURE - hAPOBEC-3F polypeptide sequence
  REGION 65..99: note = MISC_FEATURE - Nucleic acid editing domain
  REGION 248..283: note = MISC_FEATURE - Nucleic acid editing domain
MKPHFRNTVERMYRDTFSYNFYNRPILSRRNTVWLCYEVKTKGPSRPRLDAKIFRGQVYSQPEHHAEMCFLSWFCGNQLPAYKCFQITWFVSWTPCPDCVAKLAEFLAEHPNVTLTISAARLYYYWERDYRRALCRLSQAGARVKIMDDEEFAYCWENFVYSEGQPFMPWYKFDDNYAFLHRTLKEILRNPMEAMYPHIFYFHFKNLRKAYGRNESWLCFTMEVVKHHSPVSWKRGVFRNQVDPETHCHAERCFLSWFCDDILSPNTNYEVTWYTSWSPCPECAGEVAEFLARHSNVNLTIFTARLYYFWDTDYQEGLRSLSQEGASVEIMGYKDFKYCWENFVYNDDEPFKPWKGLKYNFLFLDSKLQEILE

SEQ ID NO: 33 - protein, 370 aa, Macaca mulatta
  REGION 1..370: note = MISC_FEATURE - Rhesus macaque APOBEC-3G polypeptide sequence
  REGION 1..61: note = MISC_FEATURE - Cytoplasmic localization signal
MVEPMDPRTFVSNFNNRPILSGLNTVWLCCEVKTKDPSGPPLDAKIFQGKVYSKAKYHPEMRFLRWFHKWRQLHHDQEYKVTWYVSWSPCTRCANSVATFLAKDPKVTLTIFVARLYYFWKPDYQQALRILCQKRGGPHATMKIMNYNEFQDCWNKFVDGRGKPFKPRNNLPKHYTLLQATLGELLRHLMDPGTFTSNFNNKPWVSGQHETYLCYKVERLHNDTWVPLNQHRGFLRNQAPNIHGFPKGRHAELCFLDLIPFWKLDGQQYRVTCFTSWSPCFSCAQEMAKFISNNEHVSLCIFAARIYDDQGRYQEGLRALHRDGAKIAMMNYSEFEYCWDTFVDRQGRPFQPWDGLDEHSQALSGRLRAI

SEQ ID NO: 34 - protein, 384 aa, Pan troglodytes
  REGION 1..384: note = MISC_FEATURE - Chimpanzee APOBEC-3G polypeptide sequence
  REGION 1..60: note = MISC_FEATURE - Cytoplasmic localization signal
  REGION 65..100: note = MISC_FEATURE - Nucleic acid editing domain
  REGION 257..291: note = MISC_FEATURE - Nucleic acid editing domain
MKPHFRNPVERMYQDTFSDNFYNRPILSHRNTVWLCYEVKTKGPSRPPLDAKIFRGQVYSKLKYHPEMRFFHWFSKWRKLHRDQEYEVTWYISWSPCTKCTRDVATFLAEDPKVTLTIFVARLYYFWDPDYQEALRSLCQKRDGPRATMKIMNYDEFQHCWSKFVYSQRELFEPWNNLPKYYILLHIMLGEILRHSMDPPTFTSNFNNELWVRGRHETYLCYEVERLHNDTWVLLNQRRGFLCNQAPHKHGFLEGRHAELCFLDVIPFWKLDLHQDYRVTCFTSWSPCFSCAQEMAKFISNNKHVSLCIFAARIYDDQGRCQEGLRTLAKAGAKISIMTYSEFKHCWDTFVDHQGCPFQPWDGLEEHSQALSGRLRAILQNQGN

SEQ ID NO: 35 - protein, 377 aa, Chlorocebus sabaeus
  REGION 1..377: note = MISC_FEATURE - Green monkey APOBEC-3G polypeptide sequence
  REGION 1..60: note = MISC_FEATURE - Cytoplasmic localization signal
  REGION 65..100: note = MISC_FEATURE - Nucleic acid editing domain
  REGION 257..290: note = MISC_FEATURE - Nucleic acid editing domain
MNPQIRNMVEQMEPDIFVYYFNNRPILSGRNTVWLCYEVKTKDPSGPPLDANIFQGKLYPEAKDHPEMKFLHWFRKWRQLHRDQEYEVTWYVSWSPCTRCANSVATFLAEDPKVTLTIFVARLYYFWKPDYQQALRILCQERGGPHATMKIMNYNEFQHCWNEFVDGQGKPFKPRKNLPKHYTLLHATLGELLRHVMDPGTFTSNFNNKPWVSGQRETYLCYKVERSHNDTWVLLNQHRGFLRNQAPDRHGFPKGRHAELCFLDLIPFWKLDDQQYRVTCFTSWSPCFSCAQKMAKFISNNKHVSLCIFAARIYDDQGRCQEGLRTLHRDGAKIAVMNYSEFEYCWDTFVDRQGRPFQPWDGLDEHSQALSGRLRAI

SEQ ID NO: 36 - protein, 384 aa, Homo sapiens
  REGION 1..384: note = MISC_FEATURE - Human APOBEC-3G polypeptide sequence
  REGION 1..60: note = MISC_FEATURE - Cytoplasmic localization signal
  REGION 65..100: note = MISC_FEATURE - Nucleic acid editing domain
  REGION 257..291: note = MISC_FEATURE - Nucleic acid editing domain
MKPHFRNTVERMYRDTFSYNFYNRPILSRRNTVWLCYEVKTKGPSRPPLDAKIFRGQVYSELKYHPEMRFFHWFSKWRKLHRDQEYEVTWYISWSPCTKCTRDMATFLAEDPKVTLTIFVARLYYFWDPDYQEALRSLCQKRDGPRATMKIMNYDEFQHCWSKFVYSQRELFEPWNNLPKYYILLHIMLGEILRHSMDPPTFTFNFNNEPWVRGRHETYLCYEVERMHNDTWVLLNQRRGFLCNQAPHKHGFLEGRHAELCFLDVIPFWKLDLDQDYRVTCFTSWSPCFSCAQEMAKFISKNKHVSLCIFTARIYDDQGRCQEGLRTLAEAGAKISIMTYSEFKHCWDTFVDHQGCPFQPWDGLDEHSQDLSGRLRAILQNQEN

SEQ ID NO: 37 - protein, 382 aa, Homo sapiens
  REGION 1..382: note = MISC_FEATURE - Human APOBEC-3B polypeptide sequence
  REGION 66..100: note = MISC_FEATURE - Nucleic acid editing domain
  REGION 251..289: note = MISC_FEATURE - Nucleic acid editing domain
MNPQIRNPMERMYRDTFYDNFENEPILYGRSYTWLCYEVKIKRGRSNLLWDTGVFRGQVYFKPQYHAEMCFLSWFCGNQLPAYKCFQITWFVSWTPCPDCVAKLAEFLSEHPNVTLTISAARLYYYWERDYRRALCRLSQAGARVTIMDYEEFAYCWENFVYNEGQQFMPWYKFDENYAFLHRTLKEILRYLMDPDTFTFNFNNDPLVLRRRQTYLCYEVERLDNGTWVLMDQHMGFLCNEAKNLLCGFYGRHAELRFLDLVPSLQLDPAQIYRVTWFISWSPCFSWGCAGEVRAFLQENTHVRLRIFAARIYDYDPLYKEALQMLRDAGAQVSIMTYDEFEYCWDTFVYRQGCPFQPWDGLEEHSQALSGRLRAILQNQGN

SEQ ID NO: 38 - protein, 395 aa, Rattus sp.
  REGION 1..395: note = MISC_FEATURE - Rat APOBEC-3B polypeptide sequence
MQPQGLGPNAGMGPVCLGCSHRRPYSPIRNPLKKLYQQTFYFHFKNVRYAWGRKNNFLCYEVNGMDCALPVPLRQGVFRKQGHIHAELCFIYWFHDKVLRVLSPMEEFKVTWYMSWSPCSKCAEQVARFLAAHRNLSLAIFSSRLYYYLRNPNYQQKLCRLIQEGVHVAAMDLPEFKKCWNKFVDNDGQPFRPWMRLRINFSFYDCKLQEIFSRMNLLREDVFYLQFNNSHRVKPVQNRYYRRKSYLCYQLERANGQEPLKGYLLYKKGEQHVEILFLEKMRSMELSQVRITCYLTWSPCPNCARQLAAFKKDHPDLILRIYTSRLYFWRKKFQKGLCTLWRSGIHVDVMDLPQFADCWTNFVNPQRPFRPWNELEKNSWRIQRRLRRIKESWGL

SEQ ID NO: 39 - protein, 226 aa, Bos taurus
  REGION 1..226: note = MISC_FEATURE - Bovine APOBEC-3B polypeptide sequence
DGWEVAFRSGTVLKAGVLGVSMTEGWAGSGHPGQGACVWTPGTRNTMNLLREVLFKQQFGNQPRVPAPYYRRKTYLCYQLKQRNDLTLDRGCFRNKKQRHAERFIDKINSLDLNPSQSYKIICYITWSPCPNCANELVNFITRNNHLKLEIFASRLYFHWIKSFKMGLQDLQNAGISVAVMTHTEFEDCWEQFVDNQSRPFQPWDKLEQYSASIRRRLQRILTAPI

SEQ ID NO: 40 - protein, 490 aa, Pan troglodytes
  REGION 1..490: note = MISC_FEATURE - Chimpanzee APOBEC-3B polypeptide sequence
MNPQIRNPMEWMYQRTFYYNFENEPILYGRSYTWLCYEVKIRRGHSNLLWDTGVFRGQMYSQPEHHAEMCFLSWFCGNQLSAYKCFQITWFVSWTPCPDCVAKLAKFLAEHPNVTLTISAARLYYYWERDYRRALCRLSQAGARVKIMDDEEFAYCWENFVYNEGQPFMPWYKFDDNYAFLHRTLKEIIRHLMDPDTFTFNFNNDPLVLRRHQTYLCYEVERLDNGTWVLMDQHMGFLCNEAKNLLCGFYGRHAELRFLDLVPSLQLDPAQIYRVTWFISWSPCFSWGCAGQVRAFLQENTHVRLRIFAARIYDYDPLYKEALQMLRDAGAQVSIMTYDEFEYCWDTFVYRQGCPFQPWDGLEEHSQALSGRLRAILQVRASSLCMVPHRPPPPPQSPGPCLPLCSEPPLGSLLPTGRPAPSLPFLLTASFSFPPPASLPPLPSLSLSPGHLPVPSFHSLTSCSIQPPCSSRIRETEGWASVSKEGRDLG

SEQ ID NO: 41 - protein, 190 aa, Homo sapiens
  REGION 1..190: note = MISC_FEATURE - Human APOBEC-3C polypeptide sequence
  REGION 65..100: note = MISC_FEATURE - Nucleic acid editing domain
MNPQIRNPMKAMYPGTFYFQFKNLWEANDRNETWLCFTVEGIKRRSVVSWKTGVFRNQVDSETHCHAERCFLSWFCDDILSPNTKYQVTWYTSWSPCPDCAGEVAEFLARHSNVNLTIFTARLYYFQYPCYQEGLRSLSQEGVAVEIMDYEDFKYCWENFVYNDNEPFKPWKGLKTNFRLLKRRLRESLQ

SEQ ID NO: 42 - protein, 190 aa, Gorilla sp.
  REGION 1..190: note = MISC_FEATURE - Gorilla APOBEC-3C polypeptide sequence
  REGION 65..100: note = MISC_FEATURE - Nucleic acid editing domain
MNPQIRNPMKAMYPGTFYFQFKNLWEANDRNETWLCFTVEGIKRRSVVSWKTGVFRNQVDSETHCHAERCFLSWECDDILSPNTNYQVTWYTSWSPCPECAGEVAEFLARHSNVNLTIFTARLYYFQDTDYQEGLRSLSQEGVAVKIMDYKDFKYCWENFVYNDDEPFKPWKGLKYNFRFLKRRLQEILE

SEQ ID NO: 43 - protein, 202 aa, Macaca mulatta
  REGION 1..202: note = MISC_FEATURE - Rhesus macaque APOBEC-3A polypeptide sequence
  REGION 72..103: note = MISC_FEATURE - Nucleic acid editing domain
MDGSPASRPRHLMDPNTFTFNFNNDLSVRGRHQTYLCYEVERLDNGTWVPMDERRGFLCNKAKNVPCGDYGCHVELRFLCEVPSWQLDPAQTYRVTWFISWSPCFRRGCAGQVRVFLQENKHVRLRIFAARIYDYDPLYQEALRTLRDAGAQVSIMTYEEFKHCWDTFVDRQGRPFQPWDGLDEHSQALSGRLRAILQNQGN

SEQ ID NO: 44 - protein, 185 aa, Bos taurus
  REGION 1..185: note = MISC_FEATURE - Bovine APOBEC-3A polypeptide sequence
  REGION 56..86: note = MISC_FEATURE - Nucleic acid editing domain
MDEYTFTENFNNQGWPSKTYLCYEMERLDGDATIPLDEYKGFVRNKGLDQPEKPCHAELYFLGKIHSWNLDRNQHYRLTCFISWSPCYDCAQKLTTFLKENHHISLHILASRIYTHNRFGCHQSGLCELQAAGARITIMTFEDFKHCWETFVDHKGKPFQPWEGLNVKSQALCTELQAILKTQQN

SEQ ID NO: 45 - protein, 200 aa, Homo sapiens
  REGION 1..200: note = MISC_FEATURE - Human APOBEC-3H polypeptide sequence
  REGION 54..88: note = MISC_FEATURE - Nucleic acid editing domain
MALLTAETFRLQFNNKRRLRRPYYPRKALLCYQLTPQNGSTPTRGYFENKKKCHAEICFINEIKSMGLDETQCYQVTCYLTWSPCSSCAWELVDFIKAHDHLNLGIFASRLYYHWCKPQQKGLRLLCGSQVPVEVMGFPKFADCWENFVDHEKPLSFNPYKMLEELDKNSRAIKRRLERIKIPGVRAQGRYMDILCDAEV

SEQ ID NO: 46 - protein, 210 aa, Macaca mulatta
  REGION 1..210: note = MISC_FEATURE - Rhesus macaque APOBEC-3H polypeptide sequence
MALLTAKTFSLQFNNKRRVNKPYYPRKALLCYQLTPQNGSTPTRGHLKNKKKDHAEIRFINKIKSMGLDETQCYQVTCYLTWSPCPSCAGELVDFIKAHRHLNLRIFASRLYYHWRPNYQEGLLLLCGSQVPVEVMGLPEFTDCWENFVDHKEPPSFNPSEKLEELDKNSQAIKRRLERIKSRSVDVLENGLRSLQLGPVTPSSSIRNSR

SEQ ID NO: 47 - protein, 386 aa, Homo sapiens
  REGION 1..386: note = MISC_FEATURE - Human APOBEC-3D polypeptide sequence
  REGION 78..109: note = MISC_FEATURE - Nucleic acid editing domain
  REGION 262..296: note = MISC_FEATURE - Nucleic acid editing domain
MNPQIRNPMERMYRDTFYDNFENEPILYGRSYTWLCYEVKIKRGRSNLLWDTGVFRGPVLPKRQSNHRQEVYFRFENHAEMCFLSWFCGNRLPANRRFQITWFVSWNPCLPCVVKVTKFLAEHPNVTLTISAARLYYYRDRDWRWVLLRLHKAGARVKIMDYEDFAYCWENFVCNEGQPFMPWYKFDDNYASLHRTLKEILRNPMEAMYPHIFYFHFKNLLKACGRNESWLCFTMEVTKHHSAVFRKRGVFRNQVDPETHCHAERCFLSWFCDDILSPNTNYEVTWYTSWSPCPECAGEVAEFLARHSNVNLTIFTARLCYFWDTDYQEGLCSLSQEGASVKIMGYKDFVSCWKNFVYSDDEPFKPWKGLQTNFRLLKRRLREILQ

SEQ ID NO: 48 - protein, 236 aa, Homo sapiens
  REGION 1..236: note = MISC_FEATURE - Human APOBEC-1 polypeptide sequence
MTSEKGPSTGDPTLRRRIEPWEFDVFYDPRELRKEACLLYEIKWGMSRKIWRSSGKNTTNHVEVNFIKKFTSERDFHPSMSCSITWFLSWSPCWECSQAIREFLSRHPGVTLVIYVARLFWHMDQQNRQGLRDLVNSGVTIQIMRASEYYHCWRNFVNYPPGDEAHWPQYPPLWMMLYALELHCIILSLPPCLKISRRWQNHLTFFRLHLQNCHYQTIPPHILLATGLIHPSVAWR

SEQ ID NO: 49 - protein, 229 aa, Mus musculus
  REGION 1..229: note = MISC_FEATURE - Mouse APOBEC-1 polypeptide sequence
MSSETGPVAVDPTLRRRIEPHEFEVFFDPRELRKETCLLYEINWGGRHSVWRHTSQNTSNHVEVNFLEKFTTERYFRPNTRCSITWFLSWSPCGECSRAITEFLSRHPYVTLFIYIARLYHHTDQRNRQGLRDLISSGVTIQIMTEQEYCYCWRNFVNYPPSNEAYWPRYPHLWVKLYVLELYCIILGLPPCLKILRRKQPQLTFFTITLQTCHYQRIPPHLLWATGLK

SEQ ID NO: 50 - protein, 224 aa, Homo sapiens
  REGION 1..224: note = MISC_FEATURE - Human APOBEC-2 polypeptide sequence
MAQKEEAAVATEAASQNGEDLENLDDPEKLKELIELPPFEIVTGERLPANFFKFQFRNVEYSSGRNKTFLCYVVEAQGKGGQVQASRGYLEDEHAAAHAEEAFFNTILPAFDPALRYNVTWYVSSSPCAACADRIIKTLSKTKNLRLLILVGRLFMWEEPEIQAALKKLKEAGCKLRIMKPQDFEYVWQNFVEQEEGESKAFQPWEDIQENFLYYEEKLADILK

SEQ ID NO: 51 - protein, 224 aa, Mus musculus
  REGION 1..224: note = MISC_FEATURE - Mouse APOBEC-2 polypeptide sequence
MAQKEEAAEAAAPASQNGDDLENLEDPEKLKELIDLPPFEIVTGVRLPVNFFKFQFRNVEYSSGRNKTFLCYVVEVQSKGGQAQATQGYLEDEHAGAHAEEAFFNTILPAFDPALKYNVTWYVSSSPCAACADRILKTLSKTKNLRLLILVSRLFMWEEPEVQAALKKLKEAGCKLRIMKPQDFEYIWQNFVEQEEGESKAFEPWEDIQENFLYYEEKLADILK

SEQ ID NO: 52 - protein, 224 aa, Rattus sp.
  REGION 1..224: note = MISC_FEATURE - Rat APOBEC-2 polypeptide sequence
MAQKEEAAEAAAPASQNGDDLENLEDPEKLKELIDLPPFEIVTGVRLPVNFFKFQFRNVEYSSGRNKTFLCYVVEAQSKGGQVQATQGYLEDEHAGAHAEEAFFNTILPAFDPALKYNVTWYVSSSPCAACADRILKTLSKTKNLRLLILVSRLFMWEEPEVQAALKKLKEAGCKLRIMKPQDFEYLWQNFVEQEEGESKAFEPWEDIQENFLYYEEKLADILK

SEQ ID NO: 53 - protein, 208 aa, Petromyzon marinus
  REGION 1..208: note = MISC_FEATURE - Petromyzon marinus CDA1 (pmCDAl) polypeptide sequence
MTDAEYVRIHEKLDIYTFKKQFFNNKKSVSHRCYVLFELKRRGERRACFWGYAVNKPQSGTERGIHAEIFSIRKVEEYLRDNPGQFTINWYSSWSPCADCAEKILEWYNQELRGNGHTLKIWACKLYYEKNARNQIGLWNLRDNGVGLNVMVSEHYQCCRKIFIQSSHNQLNENRWLEKTLKRAEKRRSELSFMIQVKILHTTKSPAV

SEQ ID NO: 54 - protein, 381 aa, Homo sapiens
  REGION 1..381: note = MISC_FEATURE - Human APOBEC3G D316R D317R polypeptide sequence
MKPHFRNTVERMYRDTFSYNFYNRPILSRRNTVWLCYEVKTKGPSRPPLDAKIFRGQVYSELKYHPEMRFFHWFSKWRKLHRDQEYEVTWYISWSPCTKCTRDMATFLAEDPKVTLTIFVARLYYFWDPDYQEALRSLCQKRDGPRATMKFNYDEFQHCWSKFVYSQRELFEPWNNLPKYYILLHFMLGEILRHSMDPPTFTFNFNNEPWVRGRHETYLCYEVERMHNDTWVLLNQRRGFLCNQAPHKHGFLEGRHAELCFLDVIPFWKLDLDQDYRVTCFTSWSPCFSCAQEMAKFISKKHVSLCIFTARIYRRQGRCQEGLRTLAEAGAKISFTYSEFKHCWDTFVDHQGCPFQPWDGLDEHSQDLSGRLRAILQNQEN

SEQ ID NO: 55 - protein, 182 aa, Homo sapiens
  REGION 1..182: note = MISC_FEATURE - Human APOBEC3G chain A polypeptide sequence
MDPPTFTFNFNNEPWWGRHETYLCYEVERMHNDTWVLLNQRRGFLCNQAPHKHGFLEGRHAELCFLDVIPFWKLDLDQDYRVTCFTSWSPCFSCAQEMAKFISKNKHVSLCIFTARIYDDQGRCQEGLRTLAEAGAKISFTYSEFKHCWDTFVDHQGCPFQPWDGLDEHSQDLSGRLRAILQ

SEQ ID NO: 56 - protein, 184 aa, Homo sapiens
  REGION 1..184: note = MISC_FEATURE - Human APOBEC3G chain A D120R D121R polypeptide sequence
MDPPTFTFNFNNEPWVRGRHETYLCYEVERMHNDTWVLLNQRRGFLCNQAPHKHGFLEGRHAELCFLDVIPFWKLDLDQDYRVTCFTSWSPCFSCAQEMAKFISKNKHVSLCIFTARIYRRQGRCQEGLRTLAEAGAKISFMTYSEFKHCWDTFVDHQGCPFQPWDGLDEHSQDLSGRLRAILQ

SEQ ID NO: 57 - protein, 367 aa, Homo sapiens
  REGION 1..367: note = MISC_FEATURE - hAPOBEC-4 polypeptide sequence
MEPIYEEYLANHGTIVKPYYWLSFSLDCSNCPYHIRTGEEARVSLTEFCQIFGFPYGTTFPQTKHLTFYELKTSSGSLVQKGHASSCTGNYIHPESMLFEMNGYLDSAIYNNDSIRHIILYSNNSPCNEANHCCISKMYNFLITYPGITLSIYFSQLYHTEMDFPASAWNREALRSLASLWPRVVLSPISGGIWHSVLHSFISGVSGSHVFQPILTGRALADRHNAYEINAITGVKPYFTDVLLQTKRNPNTKAQEALESYPLNNAFPGQFFQMPSGQLQPNLPPDLRAPVVFVLVPLRDLPPMHMGQNPNKPRNIVRHLNMPQMSFQETKDLGRLPTGRSVEIVEITEQFASSKEADEKKKKKGKK

SEQ ID NO: 58 - protein, 388 aa, Rattus norvegicus
  REGION 1..388: note = MISC_FEATURE - rAPOBEC-4 polypeptide sequence
MEPLYEEYLTHSGTIVKPYYWLSVSLNCTNCPYHIRTGEEARVPYTEFHQTFGFPWSTYPQTKHLTFYELRSSSGNLIQKGLASNCTGSHTHPESMLFERDGYLDSLIFHDSNIRHIILYSNNSPCDEANHCCISKMYNFLMNYPEVTLSVFFSQLYHTENQFPTSAWNREALRGLASLWPQVTLSAISGGIWQSILETFVSGISEGLTAVRPFTAGRTLTDRYNAYEINCITEVKPYFTDALHSWQKENQDQKVWAASENQPLHNTTPAQWQPDMSQDCRTPAVFMLVPYRDLPPIHVNPSPQKPRTVVRHLNTLQLSASKVKALRKSPSGRPVKKEEARKGSTRSQEANETNKSKWKKQTLFIKSNICHLLEREQKKIGILSSWSV

SEQ ID NO: 59 - protein, 363 aa, Macaca fascicularis
  REGION 1..363: note = MISC_FEATURE - mfAPOBEC-4 polypeptide sequence
MEPTYEEYLANHGTIVKPYYWLSFSLDCSNCPYHIRTGEEARVSLTEFCQIFGFPYGTTYPQTKHLTFYELKTSSGSLVQKGHASSCTGNYIHPESMLFEMNGYLDSAIYNNDSIRHIILYCNNSPCNEANHCCISKVYNFLITYPGITLSIYFSQLYHTEMDFPASAWNREALRSLASLWPRVVLSPISGGIWHSVLHSFVSGVSGSHVFQPILTGRALTDRYNAYEINAITGVKPFFTDVLLHTKRNPNTKAQMALESYPLNNAFPGQSFQMTSGIPPDLRAPVVFVLLPLRDLPPMHMGQDPNKPRNIIRHLNMPQMSFQETKDLERLPTRRSVETVEITERFASSKQAEEKTKKKKGKK

SEQ ID NO: 60 - protein, 218 aa, Rattus norvegicus
  REGION 1..218: note = MISC_FEATURE - rAPOBEC-1 (delta 177-186) polypeptide sequence
MSSETGPVAVDPTLRRRIEPHEFEVFFDPRELRKETCLLYEINWGGRHSIWRHTSQNTNKHVEVNFIEKFTTERYFCPNTRCSITWFLSWSPCGECSRAITEFLSRYPHVTLFIYIARLYHHADPRNRQGLRDLISSGVTIQIMTEQESGYCWRNFVNYSPSNEAHWPRYPHLWVRGLPPCLNILRRKQPQLTFFTIALQSCHYQRLPPHILWATGLK

SEQ ID NO: 61 - protein, 218 aa, Rattus norvegicus
  REGION 1..218: note = MISC_FEATURE - rAPOBEC-1 (delta 202-213) polypeptide sequence
MSSETGPVAVDPTLRRRIEPHEFEVFFDPRELRKETCLLYEINWGGRHSIWRHTSQNTNKHVEVNFIEKFTTERYFCPNTRCSITWFLSWSPCGECSRAITEFLSRYPHVTLFIYIARLYHHADPRNRQGLRDLISSGVTIQIMTEQESGYCWRNFVNYSPSNEAHWPRYPHLWVRLYVLELYCIILGLPPCLNILRRKQPQHYQRLPPHILWATGLK

SEQ ID NO: 62 - protein, 198 aa, Mus musculus
  REGION 1..198: note = MISC_FEATURE - mouse cytidine deaminase polypeptide sequence
  REGION 1..30: note = MISC_FEATURE - Nuclear localization sequence
  REGION 183..198: note = MISC_FEATURE - Nuclear export signal
MDSLLMKQKKFLYHFKNVRWAKGRHETYLCYVVKRRDSATSCSLDFGHLRNKSGCHVELLFLRYISDWDLDPGRCYRVTWFTSWSPCYDCARHVAEFLRWNPNLSLRIFTARLYFCEDRKAEPEGLRRLHRAGVQIGIMTFKDYFYCWNTFVENRERTFKAWEGLHENSVRLTRQLRRILLPLYEVDDLRDAFRMLGF

SEQ ID NO: 63 - protein, 224 aa, Petromyzon marinus
  REGION 1..224: note = MISC_FEATURE - pmCDA-1 polypeptide sequence
MAGYECVRVSEKLDFDTFEFQFENLHYATERHRTYVIFDVKPQSAGGRSRRLWGYIINNPNVCHAELILMSMIDRHLESNPGVYAMTWYMSWSPCANCSSKLNPWLKNLLEEQGHTLTMHFSRIYDRDREGDHRGLRGLKHVSNSFRMGVVGRAEVKECLAEYVEASRRTLTWLDTTESMAAKMRRKLFCILVRCAGMRESGIPLHLFTLQTPLLSGRVVWWRV

SEQ ID NO: 64 - protein, 331 aa, Petromyzon marinus
  REGION 1..331: note = MISC_FEATURE - pmCDA-2 polypeptide sequence
MELREVVDCALASCVRHEPLSRVAFLRCFAAPSQKPRGTVILFYVEGAGRGVTGGHAVNYNKQGTSIHAEVLLLSAVRAALLRRRRCEDGEEATRGCTLHCYSTYSPCRDCVEYIQEFGASTGVRVVIHCCRLYELDVNRRRSEAEGVLRSLSRLGRDFRLMGPRDAIALLLGGRLANTADGESGASGNAWVTETNVVEPLVDMTGFGDEDLHAQVQRNKQIREAYANYASAVSLMLGELHVDPDKFPFLAEFLAQTSVEPSGTPRETRGRPRGASSRGPEIGRQRPADFERALGAYGLFLHPRIVSREADREEIKRDLIVVMRKHNYQGP

SEQ ID NO: 65 - protein, 209 aa, Petromyzon marinus
  REGION 1..209: note = MISC_FEATURE - pmCDA-5 polypeptide sequence
MAGDENVRVSEKLDFDTFEFQFENLHYATERHRTYVIFDVKPQSAGGRSRRLWGYIINNPNVCHAELILMSMIDRHLESNPGVYAMTWYMSWSPCANCSSKLNPWLKNLLEEQGHTLMMHFSRIYDRDREGDHRGLRGLKHVSNSFRMGVVGRAEVKECLAEYVEASRRTLTWLDTTESMAAKMRRKLFCILVRCAGMRESGMPLHLFT

SEQ ID NO: 66 - protein, 158 aa, Saccharomyces cerevisiae
  REGION 1..158: note = MISC_FEATURE - yCD polypeptide sequence
MVTGGMASKWDQKGMDIAYEEAALGYKEGGVPIGGCLINNKDGSVLGRGHNMRFQKGSATLHGEISTLENCGRLEGKVYKDTTLYTTLSPCDMCTGAIIMYGIPRCVVGENVNFKSKGEKYLQTRGHEVVVVDDERCKKIMKQFIDERPQDWFEDIGE

SEQ ID NO: 67 - protein, 194 aa, synthetic construct
  REGION 1..194: note = cytidine deaminase polypeptide sequence
MKPQIRDHRPNPMEAMYPHIFYFHFENLEKAYGRNETWLCFTVEIIKQYLPVPWKKGVFRNQVDPETHCHAEKCFLSWFCNNTLSPKKNYQVTWYTSWSPCPECAGEVAEFLAEHSNVKLTIYTARLYYFWDTDYQEGLRSLSEEGASVEIMDYEDFQYCWENFVYDDGEPFKRWKGLKYNFQSLTRRLREILQ

SEQ ID NO: 68 - protein, 192 aa, synthetic construct
  REGION 1..192: note = cytidine deaminase polypeptide sequence
MADSSEKMRGQYISRDTFEKNYKPIDGTKEAHLLCEIKWGKYGKPWLHWCQNQRMNIHAEDYFMNNIFKAKKHPVHCYVTWYLSWSPCADCASKIVKFLEERPYLKLTIYVAQLYYHTEEENRKGLRLLRSKKVIIRVMDISDYNYCWKVFVSNQNGNEDYWPLQFDPWVKENYSRLLDIFWESKCRSPNPW

SEQ ID NO: 69 - protein, 280 aa, synthetic construct
  REGION 1..280: note = cytidine deaminase polypeptide sequence
MDPQRLRQWPGPGPASRGGYGQRPRIRNPEEWFHELSPRTFSFHFRNLRFASGRNRSYICCQVEGKNCFFQGIFQNQVPPDPPCHAELCFLSWFQSWGLSPDEHYYVTWFISWSPCCECAAKVAQFLEENRNVSLSLSAARLYYFWKSESREGLRRLSDLGAQVGIMSFQDFQHCWNNFVHNLGMPFQPWKKLHKNYQRLVTELKQILREEPATYGSPQAQGKVRIGSTAAGLRHSHSHTRSEAHLRPNHSSRQHRILNPPREARARTCVLVDASWICYR

SEQ ID NO: 70 - protein, 555 aa, synthetic construct
  REGION 1..555: note = pYY-BEM3.1; tr|F7B644|F7B644_HORSE polypeptide sequence
MPRGRARERQRRNPMEKLDAEAFSFHFLNMEFVYDRNCSYLCYQVEGRLSGSPVLSEQGVFPNEVCGKTRRHAELCFLDWFRGRLSPDEYYCVTWFISWSPCSNCAREVAEFLKRHRNVELSIFAARLYYCRDHEQGLQSLCNRGAQLAVMLRKDFTYCWDNFVHNSGREFSPWENIDANSDLLARKLEDLLKNPMEKLHRKTFSFHFRNLKFAKGRKCSYLCYRVEGRLSGSPGLSEQGVFLNEVCDENCRHAELCFLHWFRGRLSPHADYRVTWFISWSPCSNCAREVAEFLKQHRNVELHISAARLYYWQRNKPGLRNLRSSGAQLAIMFFWDFRDCWDNFVHNSGRHFIPWKKINVNSRLLATKLEDLLKNPLEKLHPNTFSFHFCNLEFAYDRKYSYLCYQVEGRLSGSPGLSEQGVFLNEVCGKTRCHAELCFLDWFRVRLSPDEYYRVTWFISWSPCFYCAREVADFLKQYRNVKLSIFAARLYYCRDHAQGLRSLCSSGAQLAIMFFWDFRYCWDNFVHNSGREFRPWKKINVNSRLLATKLEDILK

SEQ ID NO: 71 - protein, 437 aa, synthetic construct
  REGION 1..437: note = pYY-BEM3.2; tr|D1LZA1|D1LZA1_PANTI polypeptide sequence
MEPWRPSPRNPMDRIDPKTFRFQFPNLRYASGRKLCYLCFQVERDYFYYNDSDWGVFRNEVHPWAPCHAEQCFLSWFRDQYPYRDEDYNVTWFLSWSPCPTCAEEVVEFLEEYRNLTLSIFTSRLYYFWHPNYQEGLCKLWDAGVQLDIMSCDEFEYCWDNFVYHKGMRFQRRNLLKDYDFLAAKLQEILSPGQQRKRDWPFPPRPGAQVDPRSWVQEVTEPGINTRRHPLHLLVSFLLPRPTMNPLQEDIFYRQFGNQHRVPKPYYYRRKTYLCYQLKLPEGTLIDKDCLRNKKKRHAEICFIDKIKSLTRDTSQRFEIICYITWSPCPFCAEELVAFVKDNPHLSLRIFASRLYVHWRWKYQQGLRHLHASGIPVAVMSLPEFEDCWRNFVDHQDRLFQPWRNLDQYSESIKRRLGKILTPLNDLRNDFRNLKLE

SEQ ID NO: 72 - protein, 440 aa, synthetic construct
  REGION 1..440: note = pYY-BEM3.3; tr|A0A3Q0DM17|A0A3Q0DM17_TARSY polypeptide sequence
MPMKRMYSNIYFDHFNNQRLLSGQNAPWLCFKVERVENCMLVPLETGVFGNQVSGCCGKTERPVEPTSLTRSVLVSPNPGTELRAQQPSRKGHLGKLGCVEYPSPGLALVMLGYGASTYCPDSSMYCPETCHHPEMCFLYWFEKTLSHEEQYQITWYVSWSPCVNCAEEVAEFLSVHPKVNLTIYAARLYCYQKLNHRQGLRRLCKEGACVKIMNYEEFDHCWENFVYNNYKSFKPWVKLQDNYELLATELDKILRIPMERMPQKKFRFHFQNLIAKDRNTTWLCFEVKNVRKKHPPDLLERGIFQNQVTPRINCHAEMCFLSWFLENMLLHGKRYQVTWYISWSPCSICAEEVAEFLSAHPKVSLTIYAARLYYFWVPGYRQGLRRLVEEGARVEIMNYEEFDYCWENFVSINNEPFQPWEGLHEKYGYLVTKLNNILG

SEQ ID NO: 73 - protein, 453 aa, synthetic construct
  REGION 1..453: note = pYY-BEM3.4; tr|A0A3Q0DNJ5|A0A3Q0DNJ5_TARSY polypeptide sequence
MEDNPEPRPRQQMDQDTFIFNFNNDPSVRGRHQTFLCYEVEHLDDDTWVPQDKYLGFLHNQPQSRSNAYCAYHAELCFLELVSSWQLDPAQRYRVTCFISWSPCSSCAQEVAAFLKKNRHVTLRILAARIYDYYQGYEDGLRTLQGVGVDITVMTSAEFGHCWNTFVDHQGSPFQPWEGLDQHSQVIWQRMQDILQVIPAKYLMEKVKYTVTVDILFKGRVPGPRYLMDQNTFTRNFINNLSVSGRRQTLLCYEVERLGGDIWVPLDQLRGFLLSQARDVLNYYQGRHAEPCFLDLVSSWQLDPAQHYRVTWFISWSPCTSCAQAVAAFLRENRHVTLRILAARIYDYHQGYEEGLRTLQRTGAHIDIMTFKEFGHCWNTFVNHKGSPFKSWTGLDQHSQALRKRLQDILHTMASSLWDQSEPKKPIPSQEVTLPESIPPSHGNRFRLVKRPS

SEQ ID NO: 74 - protein, 424 aa, synthetic construct
  REGION 1..424: note = pYY-BEM3.5; tr|G5AYU5|G5AYU5_HETGA polypeptide sequence
FCFLSCVHRKPIERIYKKAFRFYFRNLRCAYGRNKTFLCYEVKRERDNKVLHKGVVLNQVEPYMPLHAELRFLSWFHDTLLCPLGSYQVTLYVSWSPCSECAEELTTFLAGHRNVTMTIYVAQLYYCNWKSPNREGLKILIAEDARLRVMFYDEFLYCWRNFVKNDYNNFDPWSLLDENSRYHNRILQNILKGWGRPHRVGPEGEQTATPGGSGGHCISVFSLLRRREMTLKEETFRVQFNNAYKAPKPYRRRVTYLCYQLQEANGDPLTKGCLRTKKGYHAESRFIKRICSMDLGQDQSYQVTCFLTWSPCPHCAQELVSFKRAHPHLRLQIFTARLFFHWKRSYQEGLQRLCRAQVPVAVMGHPEFAYCWDNFVDHQPGPFEPPWAKLEYYSSCLKRRLQQILRSWGVDDLTNDFRNLQLGP

SEQ ID NO: 75 - protein, 385 aa, synthetic construct
  REGION 1..385: note = pYY-BEM3.6; tr|A0A2Y9QMV5|A0A2Y9QMV5_TRIMA polypeptide sequence
MLSSPQTPGTRKPMKTLAPDEFSFNFENLRLAHGRNTTFLCFQVETKAPPSLNSPDSGIFQNQDHCPSHHHAEMVFLTWFQKRLSPAQHYEVTWYMSWSPCSRCAVQVAKFLKSNSTVNLSIFVARLYYPRELETKDGLHSLWQAGAQVQIMFFQDFKYCWENFVNNEGKPFQPWKNLDENSKDWDTELKDIHRNTTDLLTEEMFYSQFYNREKKSSIPRKTYLCYQLNEPQPVKRCLHYKKGYHAVTRFIDGIVSMNLDPARSYDITCYFTWSPCNRYARKLVSFIEDYPNLRLKVYTSRLYFHWCWTNMQGLQHLQNSRVTVAVMTFRDFEYCWKNFVDNQGKPFEPWEKLDLYSQSTERRLRRILKPLTPDVLNEDFGNLHL

SEQ ID NO: 76 - protein, 381 aa, synthetic construct
  REGION 1..381: note = pYY-BEM3.7; tr|H0XHI0|H0XHI0_OTOGA polypeptide sequence
LSCAFRDPMNRMYPKTFCQNFEKEPCPSNQNSSWLCFEVETKNSAVFFHRGVFRNQPAPPPRAPTSVLLSQGPVKTPCHAEECFLTWIQGVLPPDHHYHVTWYVSRGPCANCANLIVHFLAMHRRVTLTIFAAHLNFFWESDFQQGLLRMDQEGVQLHIMGYEEFEYCWDNFVYNQRKQFVPWNGLNENYEFMVSTLEDILRSPLDRIRQKDFSIHFRNSLWLDDKSTWLCFEVKRTKSPVPLYRGVFRNQSPPKTPCHAEVRFFTWLQDLPPDFCCQFTWYLSWSPCADCADLVANFLAKHRNVSLTIFVARLYYYRDPEMHRGLRRMYQEGANVDIMSVIEFEYCWDNFVYNQGKQFVPWNGLNENYEFLVPRLQEILE

SEQ ID NO: 77 - protein, 337 aa, synthetic construct
  REGION 1..337: note = pYY-BEM3.8; tr|A0A3M0K4Y7|A0A3M0K4Y7_HIRRU polypeptide sequence
MYISKKALRRHFDPRVYPRETYLLCELQWEGSRRVWIHWIRNVPDHHAEEYFLEEVFEPRNYGFCNITLYLSWSPCCTCCSKIRDFLKRNPNVKIDIRVARLIYPDYAETRSSLRELNGLQRVSIQVMEAAGLSCIESKNHRISQVERDPKGSSSPTLFTLQDHLKLSNMTESVIQDSVSIQICYQMRILGFQCHIRWKLQPEDFQRNYSPNQIGRVVYLLYEVRWRRGSIWRNWCSNNPEQHAEVNFLENHFHHRPQTPCSITWFLSTSPCGKCSRRILEFLKSQPNVTLEIYAAKLFRHHDIRNRQGLRNLMMNGVTIYIMNLEGNPASLCLSVD

SEQ ID NO: 78 - protein, 237 aa, synthetic construct
  REGION 1..237: note = pYY-BEM3.9; tr|A0A3P4LUZ8|A0A3P4LUZ8_GULGU polypeptide sequence
MSFEDYEYCWETFVDHKGMYFQSWDLLRDNDLLAAELKNILRSTMNPLRQEIFYHQFGNQPRAPRPYHRRKTYLCYQLQPHEGPITARVCLQNKKKRHAEIRFIDNIRALRLDRSQTFEITCYLTWSPCPTCAKALAVFVQDHPHISLRLFASRLFIHWCWKYQEGLRLLHRSRIPVAVMRLQEFEDCWRNFVDNQDEPFQPWNKLEQYSESITRRLRRILGHPQNNLENDFRNLHI

SEQ ID NO: 79 - protein, 221 aa, synthetic construct
  REGION 1..221: note = pYY-BEM3.10; tr|G5BPM8|G5BPM8_HETGA polypeptide sequence
RRRIEPWQFEASFDPRQLRRETCLLSEVRWGTSPRAWRGCSLNTARHAEVSFMDRLTSEGRLRGPVRCSITWFLSWSPCGACAQAIGEFLRQHPNVSLVIYIARLFWHVDEQNRQGLRDLVTRGVRMQVMSDPEFAHCWRNFVNYSPGQEARWPQVPPVWTWLYSLELHCILLNLPPCLKISRRHHNQLTFFQLILQNCHYQAIPSPVLLASGLIHPFVTW

SEQ ID NO: 80 - protein, 211 aa, synthetic construct
  REGION 1..211: note = pYY-BEM3.11; tr|H2M862|H2M862_ORYLA polypeptide sequence
MITKLDSVLLPKKKFIYHYKNMRWARGRHETYLCFVVKRRVGPESLSFDFGHLRNRNGCHVELLFLRHLSALCPGLWGYGATGQGRVSYSITWFCSWSPCANCSFRLAQFLSQTPNLRLRIFVSRLYFCDLEDSREREGLRMLKKVGVHITVMSYKDYFYCWQTFVARKQSKFKPWDGLHQNSVRLSRKLNRILQPCETEDFRDAFKLLGL

SEQ ID NO: 81 - protein, 353 aa, synthetic construct
  REGION 1..353: note = pYY-BEM3.12; tr|H0Y0C6|H0Y0C6_OTOGA polypeptide sequence
MYLKTFYRHFNNRPYLSRRNDTWLCFEVKTTSSNSPGSFYSGVFRNQGPRYCPWHTELCFLTWVRPIVSHHHFYQITWYMSWSPCANCAWQVATFLATHENVSLTNYTVRIYYFWRQDYRQGLLRMIEEGTQVYVMSSKEFQHCWENFVDHWGTRWVTCWNRLKKNYEFLVTRLSEILSDPKERISPNTFYNQFNNTPVPRGRKDTWLCFEVKEKNSNSPGSFHRGVFQNQVFSGTSSHARRCPPDHHYEVTWYTSWSPCAHCAWHVVNFLTSNPNVSLTIFAARLYYIYRPEIQQGLRRVFQEGAKVHIMSLKEFKYCWAKLVYNSGMRFMPWYQFNFNFLFPNTTLKGDLH

SEQ ID NO: 82 - protein, 189 aa, synthetic construct
  REGION 1..189: note = pYY-BEM3.13; tr|A0A3Q2Z5X6|A0A3Q2Z5X6_HIPCM polypeptide sequence
MDVHFMNFIYHYKNMRWAKGRNETYLCFVVKRRVGPNSLTFDFGHLRNRNGCHVELLFLRYLGRRLSYSITWFCSWSPCANCSAALSQFLSRMPNLRLRIFVARLYFCDMEDSHEREGLRLLQKAGVQVTVMSYKDYYYCWQTFVDRKKSHFKAWEDLHQNSVRLSRKLNRILQPCEMDLRDAFKLLGL

SEQ ID NO: 83 - protein, 190 aa, synthetic construct
  REGION 1..190: note = pYY-BEM3.15; tr|A0A2K6NY90|A0A2K6NY90_RHIRO polypeptide sequence
MNPHIRNPMEAMYPGTFYFHFKNLWEADNRNESWLCFAVEVIKHHSTVSWKRGVFRNQVDPETHCHAEKCFLSWFCDNTLSPKKNYQVTWYTSWSPCPECAREVAKFLARHSNVMLTIYTARLYYSQYPNYQEGLRRLNEEGVPVEIMDYEDFKYCWENFVYNGDELFKPWKGLKYNFLFLDSKLQEILE

SEQ ID NO: 84 - protein, 202 aa, synthetic construct
  REGION 1..202: note = pYY-BEM3.16; tr|Q6ICH2|Q6ICH2_HUMAN polypeptide sequence
MNPQIRNPMERMYRDTFYDNFENEPILYGRSYTWLCYEVKIKRGRSNLLWDTGVFRGPVLPKRQSNHRQEVDPETHCHAERCFLSWFCDDILSPNTNYEVTWYTSWSPCPECAGEVAEFLARHSNVNLTIFTARLCYFWDTDYQEGLCSLSQEGASVKIMGYKDFVSCWKNFVYSDDEPFKPWKGLQTNFRLLKRRLREILQ

SEQ ID NO: 85 - protein, 202 aa, synthetic construct
  REGION 1..202: note = pYY-BEM3.17; tr|G8GPV1|G8GPV1_CERNE polypeptide sequence
MDGSPASRPGHVMDPGTFTSNFNNKPWVSGQRETYLCYKVERSHNDTWVLLNQHRGFLRNQAKNRLHGDYGCHAELCFLGEVPSWRLDPTQTYRVTWFISWSPCFSGGCAEQVRAFLQENTHVRLRIFAARIYDYDFLYQEALRTLRDAGAQVSIMTYEEFKHCWDTFVDHQGRPFQPWDGLDEHSQALSGRLQAILQNQGN

SEQ ID NO: 86 - protein, 181 aa, synthetic construct
  REGION 1..181: note = pYY-BEM3.18; tr|Q1WBT6|Q1WBT6_SYMSY polypeptide sequence
MALLTAKTFRLQFNNKRRVTKPYYPRKALLCYQLTPQNGSTPTRGYFKNKKKRHAEIRFINKIKSMGLDETQCYQVTCYLTWSPCPSCAWELVDFIKAHDHLNLGIFASRLYYHWCRHQQEGLRLLCGSQVPVEVMGFPEFADCWENFVDHEEPLSFNPSEMLEELDKNSRAIKRRLEKIK

SEQ ID NO: 87 - protein, 211 aa, synthetic construct
  REGION 1..211: note = pYY-BEM3.19; tr|A0A3B4CS14|A0A3B4CS14_PYGNA polypeptide sequence
MDNTNRRKFIYHYKNVRWARGRHETYLCFVVKKRNSPDSLSFDFGHLRNRNGCHVELLFLRYIEVLCPGLWGSGVDGVRVSYAVTWFCSWSPCSNCAQRLTNFLSQTPNLRLRIFVARLYFCDEEDSLEREGLRHLQRAGVQITVMTYKDFFYCWQTFVASRERCFKAWEGLRQNSVRLSRKLNRILQVFISTPVISPLITTHLGQSWAGG

SEQ ID NO: 88 - protein, 315 aa, synthetic construct
  REGION 1..315: note = pYY-BEM3.20; tr|A0A087XZI4|A0A087XZI4_POEFO polypeptide sequence
RKVSYSVTWFCSWSPCANCSIRLAQFLHQTPNLRLRIFVSRLYFCDLEDSREREGLRILKKAGVHITVMSYKDYFYCWQTFVAKSQSKFKPWDGLHQNYIRLSRKLNRILQPALDIKKFIYHYKNLRWARGRCETYLCFVVKKKLHLFMFVIVGRNRLFDLNVTMNNKSLYLIPLHLQLLFLRHLGALCPGLWGYGVTGERKVSYSVTWFCSWSPCANCSIRLAQFLHQTPNLRLRIFVSRLYFCDLEDSREREGLRILKKAGVHITVMSYKDYFYCWQTFVAKSQSKFKPWDGLHQNYIRLSRKLNRILQVQFF

SEQ ID NO: 89 - protein, 189 aa, synthetic construct
  REGION 1..189: note = pYY-BEM3.21; tr|A0A341AEK4|A0A341AEK4_9CETA polypeptide sequence
MASDRGPSAGDATSRRRIEPWEFEVSFDPRELCKETRLLYEIKWGRSQHVWRHSGKNTTNHVECNFIEKFTSERPFHRSVSCCITWFLSWSPCWECSKAIREFLNQHPRVTLFIYVARLFQHMDPQNRQGLRDLIHSGVTIQIMGPTEYDYCWRNFVNYPPGKEAHWPRYPPPLMKLYALELHCIILVP

SEQ ID NO: 90 - protein, 180 aa, synthetic construct
  REGION 1..180: note = pYY-BEM3.22; tr|E2D879|E2D879_MUSMI polypeptide sequence
RNLISRETFNFNFENLCYAKGRKNTFLCYEVTRKDCDSPVSLCHGVFKNKGSIHAEICFLYWFHDKVLKVLTPREEFKVTWYMSWSPCFECAEQVVRFLATHHNLNLTIFSSRLYNVSDPDTQQKLCRLVQEGAQVAVMDLSEFKKCWEKFVDNDGQQFRPWKRLRTNFRYQNSKLQEIL

SEQ ID NO: 91 - protein, 221 aa, synthetic construct
  REGION 1..221: note = pYY-BEM3.23; tr|A0A2K5RDN6|A0A2K5RDN6_CEBCA polypeptide sequence
MWEAQSPGLSREWGSVAISPEDPGPLHIGRFLSCAFRHPMNAMYPGIFNFHFRNLRKAYGRNETWLCFTVEGIMNRSTVSWKSGVFRNQVGSDPFCHAEMCFLSWFRHNMLSPKKDYEVTWYASWSPCPECAGQVAEFLARHGNVRLTIFTAHLYYFWNPSFRQGLRRLSQEGASVLIMGYEDFEYCWDNFVYNDGQPFKPWKRLQDNSLSLYITLQEILQ

SEQ ID NO: 92 - protein, 206 aa, synthetic construct
  REGION 1..206: note = pYY-BEM3.24; tr|A0A2K5RDN7|A0A2K5RDN7_CEBCA polypeptide sequence
MEASPASRPRPLMGPRTFTENFTNNPEVFGRHQTYLCYEVKCQGPDGTRDLMTEQRDFLCNQARNLLSGFDGRHAERCFLDRVPSWRLDPAQTYRVTCFISWSPCFSCAREVAEFLQENPHVNLRIFAARIYDCRPRYEEGLQMLQNAGAQVSIMTSEEFRHCWDTFVDHQGHPFQPWEGLDEHSQALSRRLQAILQGNRWMILSL

SEQ ID NO: 93 - protein, 184 aa, synthetic construct
  REGION 1..184: note = pYY-BEM3.25; tr|A0A1C9CJ69|A0A1C9CJ69_CERAL polypeptide sequence
NPMKAMDPHIFYFHFKNLRKAYGRNETWLCFAVEIIKQRSTVPWRTGVFRNQVDPESHCHAERCFLSWFCEDILSPNTDYRVTWYTSWSPCLDCAGEVAEFLARHSNVELAIFAARLYYFWDTHYQQGLRSLSEKGASVEIMGYEDFKYCRENFVCDDGKPFKPWKGLKTNFRFLKRRLQEILE

SEQ ID NO: 94 - protein, 197 aa, synthetic construct
  REGION 1..197: note = pYY-BEM3.26; tr|A0A2R2Z4D2|A0A2R2Z4D2_PTEAL polypeptide sequence
MHLQVWRKVTEAWREGYTLKPWSRNPMERLYHDYFYFHFYNLPTPKHRNGCYICYQVEGTKKHSRMPLLRGVFENQESLDMMLSPGEKYRVTWYISWSPCFACVDEVIKFLREHTNVELIIFAARLYHSDILQYRQGLRKLHDAGVHVAIMSYYEFKHCLNDFVFHQGRSFCPWNDLNKNSKNLSNTLEDILRNQED

SEQ ID NO: 95 - protein, 206 aa, synthetic construct
  REGION 1..206: note = pYY-BEM3.27; tr|B7T161|B7T161_SHEEP polypeptide sequence
MTEGWAGSGLPGRGDCVWTPQTRNTMNLLRETLFKQQFGNQPRVPPPYYRRKTYLCYQLKELDDLMLDKGCFRNKKQRHAEIRFIDKINSLNLNPSQSYKIICYITWSPCPNCASELVDFITRNDHLNLQIFASRLYFHWIKPFCRGLHQLQKAGISVAVMTHTEFEDCWEQFVDNQLRPFQPWDKLEQYSASIRRRLQRILTAPT

SEQ ID NO: 96 - protein, 205 aa, synthetic construct
  REGION 1..205: note = pYY-BEM3.28; tr|A0A2R2X2G4|A0A2R2X2G4_PTEAL polypeptide sequence
MAGLGQACEGCCGQMPEISYPMGRLDPKTFSFEFKNLPYAYGRKSSYLCFQVEREQHSSPVPSDWGVFKNQFCGTEPYHAELCFLNWFRAEKLSPYEHYDVTWFLSWSPCSTCAEEIAIFLSNHKNVRLNIFVSRIYYFWKPAFRQGLQELDHLGVQLDAMSFDEFKYCWENFVDNQGMPFRCWKKVHQNYKSVLRKLNEILRRR

SEQ ID NO: 97 - protein, 309 aa, synthetic construct
  REGION 1..309: note = pYY-BEM3.29; tr|G1Q1M4|G1Q1M4_MYOLU polypeptide sequence
YAELSFLDLFQSWNLDRGRQYRLTWYMSWSPYPDCAQKLVEFLGENSHVTLRIFAADIHSLCSGYEDGLRKLRDARAQLAIMTRDELQYCWVTFVDNQGQPFRPWPNLVEHIKTKKQELKDILGNPMRRMYPKTFNFNFQNLNSYGRKSTFLCFEVETWEDGSVLDYQNGVFQNQLDPGHAELCFIEWFHEKVLFPDEVRCPDAQYHVTWYISWSPCFECAEQVAGFLNEHENVDLSISAARLYLCEDEDEQGLQDLVAAGAKVAMMAPEDFEYCWDNFVYNRGWPFTYWKHVRRNYGRLQEKLDEILW

SEQ ID NO: 98 - protein, 216 aa, synthetic construct
  REGION 1..216: note = pYY-BEM3.30; tr|A0A1S3AN78|A0A1S3AN78_ERIEU polypeptide sequence
RRIEPWEFEDFFDPRQFRPETCLLYEVRWGSSRNAWRSTARNTTRHAEVNFLERFAAERHFDKPVSCSITWFLSWSPCWECSQAIGAFLSQHPQVTLAIHVTRLFHHEDEQNRQGLRDLLARGVTLQVMGDSEYAHCWRTFVNSPPGAEGHYPRYPSDFTRLYALELHCIILGLPPCLEILRRYQNQFTLFRLVPQNCHYQMIPHLNFFVVRHYFF

SEQ ID NO: 99 - protein, 201 aa, synthetic construct
  REGION 1..201: note = pYY-BEM3.32; tr|Q4VUI3|Q4VUI3_XENLA polypeptide sequence
MTMDSMLLKRNKFIYHYKNLRWARGRHETYLCYIVKRRYSSVSCALDFGYLRNRNGCHAEMLFLRYLSIWVGHDPHRNYRVTWFSSWSPCYDCAKRTLEFLKGHPNFSLRIFSARLYFCEERNAEPEGLRKLQKAGVRLSVMSYKDYFYCWNTFVETRESGFEAWDGLHENSVRLARKLRRILQPPYDMEDLREVFVLLGL

SEQ ID NO: 100 - protein, 191 aa, synthetic construct
  REGION 1..191: note = pYY-BEM3.33; tr|E2RL86|E2RL86_CANLF polypeptide sequence
MNPLQEETFYQQFSNQRVPKPTYQRRTYLCYQLKPHEGSVIAKVCLQNQEKRHAEICFIDDIKSRQLDPSQKFEITCYVTWSPCPTCAKKLIAFVNDHPHISLRLFASRLYFHWRQKYKRELRHLQKSGIPLAVMSYLEFKDCWEKFVDHKGRPFQPWNKLKQYSESIGRRLQRILQPLNNLENDFRNLRL

SEQ ID NO: 101 - protein, 226 aa, synthetic construct
  REGION 1..226: note = pYY-BEM3.34; tr|G1LWB0|G1LWB0_AILME polypeptide sequence
SSAAPASIHLLDEDTFTENFRNDDWPSRTYLCYKVEGPDQGSGVPLGQDKGILHNKPAQGPEPSRHAECYLLEQIQSWNLDPKLHYGVTCFLSWSPCAKCAQKMARFLQENSHVSLKLFASRLYTRERWDEDYKEGLRTLKRAGASIAIMTYREFEHCWKTFVLHDQEGSCFQPWPFLHKESQKFSEKLQAILQVGVLLLSLPPPLPSSPLSSPWPFPAPLRASTG

SEQ ID NO: 102 - protein, 238 aa, synthetic construct
  REGION 1..238: note = pYY-BEM3.35; tr|A0A1U7S7K7|A0A1U7S7K7_ALLSI polypeptide sequence
MGEHWQYAGSGEYIPQDQFEENFDPSVLLAETHLLSELTWGGRPYKHWYENTEHCHAEIHFLENFSSKNRSCTITWYLSWSPCAECSARIADFMQENTNVKLNIHVARLYLHDDEHTRQGLRYLMKMKRVTIQVMTIPDYTYCWNTFLEDDGEDESDDYGGYAGVHEDEDESDDDDYLPTHFAPWIMLYSLELSCILQGFAPCLKIIQGNHMSPTFQLHVQDQEQKRLLEPANPWGAD

SEQ ID NO: 103 - protein, 220 aa, synthetic construct
  REGION 1..220: note = pYY-BEM3.36; tr|A0A2R2X2J8|A0A2R2X2J8_PTEVA polypeptide sequence
MPRIGNMNLLSEKTFNYHFGNQLRVKKPQGRRRTYLCYKLKLPNETLVKGYFINKKKNHAEIRFINKIRSLNLDQTQSYKITCYITWSPCSYCAGKLVALVKSCPHLSLQIFTSRLYYHWLWKNQAGLRYLWKINISVLVMKEPEFADCWDNFVNHQSRRFKPWEKLTQYSNSTERRLLRILRINRTDLFLAQSSEQDPGLNDLVDAIKRLFLDAHRPRD

SEQ ID NO: 104 - protein, 198 aa, synthetic construct
  REGION 1..198: note = pYY-BEM3.37; tr|A0A151P6M4|A0A151P6M4_ALLMI polypeptide sequence
MAVEEEKGLLGTSQGWKIELKDFQENYMPSTWPKVTHLLYEIRWGKGSKVWRNWCSNTLTQHAEVNCLENAFGKLQFNPPVPCHITWFLSWSPCCQCCRRILQFLRAHSHITLVIKAAQLFKHMDERNRQGLRDLVQSGVHVQVMDLPDYRYCWRTFVSHPHEGEGDFWPWFFPLWITFYTLELQHILLQQHALSYNL

SEQ ID NO: 105 - protein, 158 aa, synthetic construct
  REGION 1..158: note = pYY-BEM3.38; tr|A0A2K6MNR2|A0A2K6MNR2_RHIBE polypeptide sequence
IWLCFTMEIIKQCSTVSWKRGVFRNQVDPETHCHAERCFLSWFWEDTLSPNTNYQVTWYTSWSPCLDCAGEVAEFLARHSNVKLAIFAARLYYFWDTDYQQGLRSLSEEGTSVEIMGYEDFKYCWENFVYNGDEPFKPWKGLKYNFLFLDSKLQEILE

SEQ ID NO: 106 - protein, 182 aa, synthetic construct
  REGION 1..182: note = pYY-BEM3.40; tr|F1CGT0|F1CGT0_ANOCA polypeptide sequence
KAAILLSNLFFRWQMEPEAFQRNFDPREFPECTLLLYEIHWDNNTSRNWCTNKPGLHAEENFLQIFNEKIDIKQDTPCSITWFLSWSPCYPCSQAIIKFLEAHPNVSLEIKAARLYMHQIDCNKEGLRNLGRNRVSIMNLPDYRHCWTTFVVPRGANEDYWPQDFLPAITNYSRELDSILQD

SEQ ID NO: 107 - protein, 230 aa, synthetic construct
  REGION 1..230: note = pYY-BEM3.41; tr|C7AGG3|C7AGG3_HORSE polypeptide sequence
MDPQAPTQRGGLGQAYQGGDYVQAPGNGNTQHLLSEDVFKKQFGNQRRVTKPYYRRKTYVCYQLKLLRGPTIAKGYFRNKKKRHAEIRFIDKINSLGLDQDQSYEITCYVTWSPCATCACKLIKFTRKFPNLSLRIFVSRLYYHWFRQNQQGLRQLWASSIPVVVMGYQEFADCWENFADNRGNPFQSWEKLTEYSKGIKRRLQKILEPLNLNGLEDAMGNLKLGSVDLG

SEQ ID NO: 108 - protein, 197 aa, synthetic construct
  REGION 1..197: note = pYY-BEM3.42; tr|A0A250YMK7|A0A250YMK7_CASCN polypeptide sequence
MSLLKEDIFLYQFNNQQQVQKPYFRRRTYLCYQLEQPNGSRPQWPAKGCLQNKKGHHAEIRFIKRIHSMGLEQDQDYQITCYITWSPCLACACALAELKNHFPRLTLRIFASRLYFHWIRKFQMGLQHLYKSGVLVAVMSLPEFTDCWEKFVNHRQVFFTPWDKLEEHSRSIQRRLRRILQSWDVDDLTDDFRNLRL

SEQ ID NO: 109 - protein, 189 aa, synthetic construct
  REGION 1..189: note = pYY-BEM3.43; tr|B7T160|B7T160_SHEEP polypeptide sequence
MPWISDHVARLDPETFYFQFHNLLYAYGRNCSYICYRVKTWKHRSPVSFDWGVFHNQVYAGTHCHSERRFLSWFCAKKLRPDECYHITWFMSWSPCMKCAELVAGFLGMYQNVTLSIFTARLYYFQKPQYRKGLLRLSDQGACVDIMSYQEFKYCWKKFVYSQRRPFRPWKKLKRNYQLLAAELEDILG

SEQ ID NO: 110 - protein, 541 aa, synthetic construct
  REGION 1..541: note = pYY-BEM4.1; tr|A0A182D0J1|A0A182D0J1_BLAVI polypeptide sequence
MTNPESPPQAPCDFNEDALLNREPLRGSPIKFVSPVDYPDLVFALAGPVGVDIDYIQQSISDCLKSFDYSTEFIRITEIMQDIKCSKTIDCTDMLKEYQSKIEYANELRRAYRAKDLLAALTISAISKLREQIKERDEATNKSNIQPSRRKLAWVVRQLKTPEEVRLLRAVYGKQFVLVSIYSSPQRREDFLISKIKIKSRGTIDNNTSSEGAQRLIERDSKEDNEYGQNLSGTFCLGDIFVDSNNKESAIVSIDRFLNAFFGSNEISPTRDEYGMYLAKTASLRSCDLSRQVGAAIFSKTGEIISLGSNEVPKAGGGTYWTGDNADSRDIRLGHDPNEINKVEIFAEIISRLLEDKLLSNDLLNKDAASIVTILLSKNEGKRYKDLRVMDIIEFGRIIHAEMSAICDAARNGRAIIGATLFCTTFPCHLCAKHIVASGIGRIVYLEPYPKSYAKKLHSDSIQVEDHSDSEKVSFEPFIGISPSRYRELFEGGRRKDPFGEALKWKNDPRKPVIDVVVPPHFEAEKLVIAQLGKLIVSGTG

SEQ ID NO: 111 - protein, 330 aa, synthetic construct
  REGION 1..330: note = pYY-BEM4.2; tr|A0A2D6EXD2|A0A2D6EXD2_9ARCH polypeptide sequence
MIIGLVGTIGAGKQTIIDYLQEKYGYNALSCSDVLREILKKQGKPVTRDNLREIGNKTREEGGNGAIAKILLEKLRNNWKANYIVDSLRHPDEVSVLRTSPLFHLVAVDADLRIRFERVKARKREEEPTTLPAFVERDQKEMFGTGNEQRIRETMELADELVLNNGTVEELKQRIDDLNLVSDERLRPSWDDYFMRLARLAAQRSNCMSRKVGAIITKDRRVIATGYNGTPRGVKNCNEGGCERCNSAVAKGTAISECLCLHGEENAIIEAGRVRSEGATIYTSFLPCLWCTKMIIQAGLKEVVFSEVYDLHEASIKLFETSGVLIRRLK

SEQ ID NO: 112 - protein, 367 aa, synthetic construct
  REGION 1..367: note = pYY-BEM4.3; tr|F7YVM7|F7YVM7_9THEM polypeptide sequence
MNEFKYMSLALKLAKKGKYTTSPNPMVGAVIVKDGKILATGYHKKAGQPHAEINALSKLNFQAQNCEMYVTLEPCSHYGRTPPCADAIIRSGIRKVVIATLDPNPLVNGKGVEKLKNAGIEVVCGVLEEKAKKLNEKFFKYITTKIPFVALKIAQTLDGKIALKNGESKWITSEKSREYVHKLRMEYDAVLTGIGTILKDDPQLNVRLKKVYKQPLRIILDSKLKIPLSAKVLEDPSKVIILTTALADKEKLEELRSKGVEVIITNEKNGIVDLESALKILGEKKITSVMVEAGPTLLTSFLKESLFDKIYLFIAPKIFGADSKSVFSELGLEDISKSQKFSLESVKKIGEDLLLELYPKQLKKLEE

SEQ ID NO: 113 - protein, 449 aa, synthetic construct
  REGION 1..449: note = pYY-BEM4.4; tr|A0A3M6UNF1|A0A3M6UNF1_9CNID polypeptide sequence
MEEKSELENELMRSTSPKPSVPNGSKGNECEQRETRITKENLYMVLALWMEEFPVVEQTSSAKRLNKVGVVFVLPTDRVLAADCSRDGVHGVARVMVNHCGKLEGCKVFVSRKPCSLCAKLLVQSKVSRVFYLPIEPESENKGEIARADNLFKNSSVGQSVFVPCVEQKVLDKLEDKLPKEIITPDDISECRDNLLKKCGWSAEWFARAQASLPWPCFEGKMKSQVDNDFKSLIKWIAVVKAPMDKGVAFPKVKLTSDSRVVPDCDADNFPDSKTAYHMMIFAKMLARQTDDPKTGVGAVIVRGKVPDIVSLGWNGFPSKALYGEFPRASDDDRALQKKFPYVIHAEQNALMVRNVKDLTDGILFVTKPPCDECAPMIKLSGVKTIVIGEKIEKSRGGELSYNLIKEYIKEGIMTCYQMEATKTKAKRLASDPETRKRLKSSCSNSNDV

SEQ ID NO: 114 - protein, 414 aa, synthetic construct
  REGION 1..414: note = pYY-BEM4.5; tr|A0A2G3K826|A0A2G3K826_9BURK polypeptide sequence
MTKIIDDVNTAAAAVLDQATAAANQTTFAVGGVMVNNQTGEVISAIHNNVIIPLSNNVSFTFDPTAHGERQLVYWYYANKEALKLPEPNQITVITSLDPCAMCTGALLTAGFNVGVVAIDTYAGINCAQNFQFATLPANLRTKAQKNFGYYASGAANFKPLTRSYVGGPSVAFKNGVVTPANLRDCGTVFTQSVDTVRNTSNSTGLAPSQMSNPAELPSNSAILQAYRAIYKKAFTIKIDNPRLPDAQILTELKAVLADAPNARNAVAFIDPFGNLVLCMADAFNTSPVHAAFMNVTQEYAKTRWDLMNKYAQASTTDNPALYLTHPKYGTFVYLYAPDPDDSITIMSLGAYGSTMEGPIPNMFPSNLQFYYPPRNGAQFSELVPVVNELPPFYTQNVNISLMQVPGVTQAPTK

SEQ ID NO: 115 - protein, 308 aa, synthetic construct
  REGION 1..308: note = pYY-BEM4.6; tr|K1ZCJ4|K1ZCJ4_9BACT polypeptide sequence
MSSRAKKNRSTNLKKSIGQKSIENKPTDQKKDQVLVAYVPVIHEGYRRFFRHFPAVKELWLISQELSHELRSLQKDIRALKASETKKLLQTWGQFQKIKLLTPSSLAILQKTTTQLVFPDEEISHHLVEKYFAQNRVLFASFFLRWDKKSSLKKHDLQEYSEISNKEFDQMMIAIAQQEADKSDDWWRQVGGLIFKDETILLLAHNQHTPTEAEAYFAGDPRADFHQGEYLKISTAIHAEAYLIAQAAKQGISLEGADLYVTTFPCPVCAKQVAYSGIKRVFFREGYSLLDGETILKANGVKLIRVTV

SEQ ID NO: 116 - protein, 615 aa, synthetic construct
  REGION 1..615: note = pYY-BEM4.7; tr|A0A1G3PNQ8|A0A1G3PNQ8_9SPIR polypeptide sequence
MRDLPLLVLGLTGPMGAGCTRFARDISKMEPGKVIKKQGLLDQVAHEISELSKKASEIRLQCISNGKNSELAELKRLNRRLNAKLAERACLHVIAKSSLPEPLFISLNTIVIKIAVDSITAPEFAEWAKNHAKVADLLKWLRTQWESELTLYETWGQDAGRFSQDELEKMDAMFAEFERIGDEILKEDFETYFGKRNNDFSIRMFSENIRLSGNPFRPAENGGGGGKYDEPSMVMIARETDRYIRFYRTRSDQKRSHFFIIDEIKNPREAEYFRARHQNFFLVSIFSSSEIRASRMRRGLGHDAGVSDADFQHLFRELDSRDWGADDFDAHGLHRQNIYRCFNLADIAINNDVEDERFSEVLFNKFIRYYALMLSPGCVQPTPQETYMHLAYSLSLRSTCISRQVGAVITDLEDRILSLGWNEVPEGQIGCGLKVKKDYTDKENPLFEMEIWDNVITAEDLAVWDDEDSICVKDILSRIEIKTKLKSVSLTPEERADVLKALRIKRLEYSRSLHAEENAILQVASRGGVGLKDGTIYVTTFPCELCSKKIYQVGISKIYYTEPYPNSISEKVILKDGIRNIKILQFEGVKSYSYFKLFKPGFDKKDAQMLEGRGI

SEQ ID NO: 117 - protein, 291 aa, synthetic construct
  REGION 1..291: note = pYY-BEM4.8; tr|A0A1G0PGF4|A0A1G0PGF4_9BACT polypeptide sequence
MKHNNQLRKEIEKLLGQNSIIKNDELKKLQKEYKIETDELLISFLPYAAEFAKVPISKYKVGAVVLGKSGNIYFGSNMEFEAGALSATVHAEQSAVNNAWLNGETGINKIAVTAAPCGYCRQFLNELTTAKQLHVLLKDKNLEAAKVFKLTELLPEAFGPRDLEIEGGLMKVENHKLKIENINDELINAALEAANKSYAPYSKNYSGVSIQLSDGTIFSGRYSENAAYNPSLLPFQSALAFMNMNTKKGSNNKIVDAVLVEAVSNISQKDAAGTLLNSISKTKLRYYKIKN

SEQ ID NO: 118 - protein, 398 aa, synthetic construct
  REGION 1..398: note = pYY-BEM4.9; tr|A0A0P4WGY5|A0A0P4WGY5_9EUCA polypeptide sequence
MEENSSATSQPKCASRTKQGGNDLSTDMSNLSVGETKRTDFLPWDDYFMAVAFLSAMRSKDPSSQVGACIVNADKKIVGIGYNGMPIGCSDDELPWNKESLDPLQTKYMYVCHAEMNAIMNKNSSDLAGCCVYVALFPCNECAKLVIQAGIREVVFFSDKHQQKPETVASKKMLNMAGVAYRQYTPSQSKIELNLSLKEQEKSEPTADITQSSERDQNSKRKDYLSWEEYFMAMAHLSALRSKDPITQVGACIVNSKKKIVGIGYNGMPLGCNDDLMPWGNSSSNKLETKYMYVCHAGVNAIMNKNSCDVSGCTLYVALFPCNECAKVIIQAGIKTIIYASDTNKDQASILASKKMLDMAGIKYRADNLSQRKIVIDFKTIDWNSRFMNDHQNDPTCL

SEQ ID NO: 119 - protein, 259 aa, synthetic construct
  REGION 1..259: note = pYY-BEM4.10; tr|A0A3D8IG27|A0A3D8IG27_9HELI polypeptide sequence
MRKNILYFILTLFFLSGLYATSLPEDNVVSGVIYEKIDTVSAEVDHIYPMLALAIVYKDWQEKNMLNKQGHNIGLVIVDENNMPVFWVRNSVHATHNGTQHGEVRLVSNLLNCEGFNKYLDKYTLYTTLEPCIMCAGMLSMVQIPKVVYAQKDLSCGNTQEIISTAKYPRYYKAFTVENGYKKDLEECFEQYKICKNDSITDFLVNDSAKEIFRKASNDLQDYKVKFKENRRVIKVAQEFLQNIQTKDNLDVLQCPKNM

SEQ ID NO: 120 - protein, 256 aa, synthetic construct
  REGION 1..256: note = pYY-BEM4.11; tr|A0A351C8C4|A0A351C8C4_9BACT polypeptide sequence
MNELTKQSEHLRNEALRIATRSYVPYTGQQEGVIILLENGDLIPGVRVENASFQLTIPALQNALSTMYALQRTDISMIVSSIPFTDSDLAYTGGMAEIAWEMVGASLLLVAGAHIPEAGTFIDPARGENLLDVSREAALNAFIPESDFPVGSAIQTSDDVVIDGCNVEHSDWSKIICAERNVLSTARSYGLGQITTIYVSCPKEPGGTPCGACRQVIVELAPDATVWMDRGNQEPIAMKATKLLPGHFTGNVLKKQ

SEQ ID NO: 121 - protein, 301 aa, synthetic construct
  REGION 1..301: note = pYY-BEM4.12; tr|A0A1G6V2K7|A0A1G6V2K7_PEPNI polypeptide sequence
MPIVRVNEIGARLPEDWEALETAIWQAYVSREDLPDAGELDLTLVDDATIQELNKTHRQLDKSTDVLSFPMYDDRDDLAADVQAGLPVILGDIMISVPTAERQAQAYGHSFKREMAYLLVHGLLHIAGYDHMSAEEKSAMRRAEEAILADVDVPRDTAPSKTAAVLDEADVQALIDAARAARLQAYAPYSGYAVGAALLAADGRRFCGVNVENASYGATCCAERTALFAAVTAGARDFIALALVTEGDEPAPPCGLCRQALAEFSPDLAIYLAGPTGETYRRTSLAALFPEAFSLSTKESV

SEQ ID NO: 122 - protein, 528 aa, synthetic construct
  REGION 1..528: note = pYY-BEM4.13; tr|F2NP91|F2NP91_MARHT polypeptide sequence
MPVMETHALEARFKEALARLCPEGRLLAAVSGGGDSVALLYLLKAAGRDTIVAHLDHALRPDSAADAAFVEKLAQRLGFPLETEHVDVRALAHRKRINLEAAAREVRYAFLARVARRWKARCILTAHTLDDNAETVLLQILRGAGRGLGIRPLQRRVARPLLEFSRAELRAYLEARGARWLEDPTNRSLELDRNYLRHAVLPRITARFPHALEALARFSQAQQADDWALEALSARHLIPDRRWPVPAYRALPLERAPEALRRRAIRGVLEALGVRPEARLVADVEAALGGRAQTLPGGVVVRRQRGTLFFIPPTVRFPKVQPPAGLEARPPRPGDYLVFPYGRKRLVDFLNERGVPRELKRRWPVGAVGAEVRWVYGLWPEPDEDRYMRRALVLARAAARQGEVPIGAVLVRDGAVLAEAANAVEASRDATAHAELLALRTALRRVGEKVLPGATLYVTLEPCPMCYGAILEARVARVVYGVENLKAGAFTVHGLEPRVALEAGRVEGECAKVLKDFFARLRPGRDGA

SEQ ID NO: 123 - protein, 226 aa, synthetic construct
  REGION 1..226: note = pYY-BEM4.14; tr|A0A316TX77|A0A316TX77_9BACT polypeptide sequence
MINGYTPYSGNQNTCYVKGESGTFYPGVRIENVSYPLTISSVQAAVCSCLANSDNPVEYYTGDHQPELLQVWADEYDMKPGGKLPDSPLKLFDPLVPSIPDIKKELDVLTEKSVTPNSGFPVSALLQTEKGYIRGVNIELSSWALGLCAERVAISRALTAGYTQFKSIHIYAPEADFVSPCGACRQVLLEVMPDADTELYHGDGTLSKHIVSDLLPFGFTSHKLKK

SEQ ID NO: 124 - protein, 321 aa, synthetic construct
  REGION 1..321: note = pYY-BEM4.15; tr|R6VYG3|R6VYG3_9FIRM polypeptide sequence
MIHKGTQTIETKRLILRAFTPDDAEAAFENWMSDPKVTEFLRWKTHADISDSRKIVNEWANGSADPEFYQWAIVPKDVNEPIGTISVVDRNDALGIFHIGYCIGSKWWHKGITSEAFSAVIHFLFEEVGANRIESQHDPENIHSGDVMKKCGLTFEGTLRQADFNNRGIVDACVYSILQSEWQNNTSVWQRLYNAALTVQNDRVVSPFIDAGGVAAALMTKKGNIYTGICIDTASTLGMCAERNAVANMLTNGESRIDKIVAVMPDGKVGAPCGACREYMMQLDRDSGDIEILLDLETEKTVRLKDLIPDWWGAERFGDTE

SEQ ID NO: 125 - protein, 229 aa, synthetic construct
  REGION 1..229: note = pYY-BEM4.16; tr|A0A3C1HZ18|A0A3C1HZ18_9BACI polypeptide sequence
MGDIMENWNELSEPWKRCFLQAWKAYCHGSIPIGAVLVDSEGEIFLEGRNRVHELTAPEGQLCDCRIAHAEMNVLVQVKTSDYEKLSGATIYSTMEPCIQCFGAIILSRIKNISFAAIDDKLAGATTLEDRHGFIKSRNLNIAGPFSHLGEIQIILRTDFLLRIFDSEYADPLIAAHEKDYPIGVALGRHYHRNNRLQVAKKETIPFGELFNEFSFDIKRAREGYTLGK

SEQ ID NO: 126 - protein, 205 aa, synthetic construct
  REGION 1..205: note = pYY-BEM4.17; tr|A0A1M6KV24|A0A1M6KV24_9BACT polypeptide sequence
MEASQQNILLKIEGKGPVAEINFTVTLPEWLVEQVQSGSTVFLTQKEKMRFVLELARKNVAQETGGPFAAAVFSLESGELVSAGVNVVVESRCSSAHAEVVALSLAQKAVDSHDLGAAGLPRMVLVSSAEPCAMCMGAIPWSGVKQVICGARDEDVRSVGFDEGAKPLEWVEDFAERGIEVIRDVLREEATEVLWDYRERGGEIY

SEQ ID NO: 127 - protein, 207 aa, synthetic construct
  REGION 1..207: note = pYY-BEM4.18; tr|A0A2U0T9B4|A0A2U0T9B4_9RHIZ polypeptide sequence
METAELISRLLDVIEKDIAPVTAKGVARGNKLFGAAILKKSDLAVIVAETNNEIENPLWHGEMQAIKRFFELPADQRPATRDCLFLATHEPCSLCLSGITWSGFDNFYYLFSHQDSRDGFAIPYDIQILKSVYAVPEPETGTVSPARDLYNRSNDFWTSHGLQDMIAGLARSNREALLARIDDLNALYAELSERYQRDKGGKGIPLP

SEQ ID NO: 128 - protein, 231 aa, synthetic construct
  REGION 1..231: note = pYY-BEM4.19; tr|A0A2K9PN08|A0A2K9PN08_9FLAO polypeptide sequence
MSDKKESKIKISKTSESIELDEIHSLLSYSIVQKFWENDDRNGRGYNVGVILVDENKNIVDWDINSVNKTENSTQHGEMRLISRYLDKDELYSLKGYTMYPTLEPCAMCAGMMTMTNVYRTVNGQMDYFYSKALERLSIDTRECGGYPPYPRTVISEISPSSISTRLDAEYKQYTNAGNKPIITKFLSTYKAKTIYDDAFNQFINFKCKFPENKTKYENAIKFYNSLPESI

SEQ ID NO: 129 - protein, 330 aa, synthetic construct
  REGION 1..330: note = pYY-BEM4.20; tr|F4PWM7|F4PWM7_CAVFA polypeptide sequence
MRFSLSLLFVILSVLLAGVLACKDPYNPETVDYGQCASATKANYEVRSDSKVLTPADLPADELAVHESRMRHIIDIARVNNKKFVSSIYFPNGTLACIGINTGKPNMIAHGEIVAIQNCTEIHGISMYTNYSIYTTGEPCSMCASAILWSRFKTVVWSTYNSDLYCKICMSNIPIDSSYIFSRAYGLGIEAPVAIGGVVKAEGDAWFGTYCNRPTSIYYIAPKCACQDPAKVSPLKFTQTRTTVWVEGGDKVVTQWNAIISNPSNSTIVDPPIVISPSVVFKGAPWGISAASEPNTYKLSYNKVLFPGQTFSFGYSVYGLEEVAFTALEA

SEQ ID NO: 130 - protein, 193 aa, synthetic construct
  REGION 1..193: note = pYY-BEM4.21; tr|U7QZM1|U7QZM1_PHOTE polypeptide sequence
MNKTRRKLLATLGIMSISMSFIAQAGEKKTQVINNILSKQEITEHEKYMREAIKEAIKNPKHPFGAVIVNRNNGEILSRGVNTGRNNPILHGEIQAINHYITQYGNQGWENVALYTTGEPCSMCMSALVWIGIREVIWATSISVIRNSGIRQIDISAHEIAERASSFYNPITLVGGILANETDKLFLERKRGN

SEQ ID NO: 131 - protein, 319 aa, synthetic construct
  REGION 1..319: note = pYY-BEM4.22; tr|A0A081CH48|A0A081CH48_PSEA2 polypeptide sequence
MASRRHLLATQVTGNHRKLSLWHLRGWLSPYTKLVDAVYFLTTNSFYHSLQTPPVQSITMLLSSIITSLALAAQASAYREGLHPEFQSGLSINSVPATDRDHWMRLANSAIYYPPVSHPCPQAPFGTAIVNTTSNELICAIANRVGSTGDPTQHGEITAIQHCTNVMRKKGLSPQEIIAAWKQLSLYTNAEPCTMCLSAIRWAGFKEVIYGTSVGTISENGRNQIYIPSNLVLEKSYSFGHATLMLGNILTHETDPFFQHQFNESAPCPVGCERTQVGEARVKTCEPVPNWQKLVRLEYSEDSRVGSEPVAHTPLHLEL

SEQ ID NO: 132 - protein, 203 aa, synthetic construct
  REGION 1..203: note = pYY-BEM4.23; tr|A0A3D3HMU1|A0A3D3HMU1_9GAMM polypeptide sequence
MDYSDAILGAITSIRRNSKQPGVNVTDNVTDSSTQYNNDEYWMRRALALAREAGEAGEIPVGAVLVKDNQQVAGGFNQPIRSHDPAAHAEILTLREAGAVLGNYRLIDTTLYVTLEPCMMCAGALVHSRIKRLVFGAAEPKTGAAGSFIDLLTLPRLNHYMEVTGGVLGEECSVLLSDFFRRRRAEKKALKRQNSESGSDSAS

SEQ ID NO: 133 - protein, 270 aa, synthetic construct
  REGION 1..270: note = pYY-BEM4.24; tr|A0A1N5WT13|A0A1N5WT13_9ACTN polypeptide sequence
MLEKIERRLVAAAEAVVRSPSTGDAHTVAAAAMDANGDIYSGVNVFHFTGGPCAELVVIGSAAAANAPPLITIVAVGDGDRGVIAPCGRCRQVMLDLHPDVFVIVPTGDGQLAAKPVRELLPFGYVARTGSTAPRVVYFHPRHYDTISSGLKTATVRFQDSVQTGPAVFVFDDGESIRRLDAVVEKVESRRLDHLTEEDAHHEALPDSDALRDAIKTQYPMLGDGDVVDVATFRLTAISAPDPDPRSSYPPAVSRCNPAGPRADLLVGQS

SEQ ID NO: 134 - protein, 257 aa, synthetic construct
  REGION 1..257: note = pYY-BEM4.25; tr|X0SAC5|X0SAC5_9ZZZZ polypeptide sequence
MTKDGRVIASAHDTEVTDQDSTAHAEINAIRKASKIYRKDLTGCLIISTHEPCPMCTGSIIWSNISKVVYGVSIRDSIKAGRDMINLSCKEIIKKPNAEINIYDGILKKECLKLYNNDTRKLVKKFRKYEWINIEENLLNKRMQWFENNKTMIRKLKGNDLEKAYHLILMKIGIKRSEAPIVKKSESKIIFHSKNYCPSLEACIILDLDTREVCKEIYERPTEELIRRLNSKLRFTRNYDCIRPYSDYCEEIIILEK

SEQ ID NO: 135 - protein, 154 aa, synthetic construct
  REGION 1..154: note = pYY-BEM4.26; tr|A0A3B8IC10|A0A3B8IC10_9BACT polypeptide sequence
MPSHEDFIHQCLELGKEALLQGNPPVGSVIVWQDQVIGRGIENGRSSGDITQHAELLALQEAVATGQRDKLKEAIIYSTHEPCVMCAYPIRQYKIPTVVYSVAVPELGGHTSSWHLLTTEDVPKWGKAPKIITGISAEEVEALNAAFQDSLKKG

SEQ ID NO: 136 - protein, 180 aa, synthetic construct
  REGION 1..180: note = pYY-BEM4.27; tr|A0A2N9P8B9|A0A2N9P8B9_9FLAO polypeptide sequence
MFIFKLISPPVSIEVYQDKIIQKLYICFMENIFTDEYFMKKALQEAETAFQQGEIPVGAVIVIDNRIIARSHNLTEMLNDVTAHAEMQAITASANFLGGKYLKDCTLYVTLEPCQMCAGALYWSQISKIVYGATDEQRGYRAMGAQLHPKTKVISGIMQNECTHLMKDFFKQRRSKSTKD

SEQ ID NO: 137 - protein, 178 aa, synthetic construct
  REGION 1..178: note = pYY-BEM4.28; tr|K1KX30|K1KX30_9BACT polypeptide sequence
MVKNPVNNNELYFGKHSEIPMNEEQKAYMKMAVDLSRSGMESGKGGPFGCVIVKDGKVIGIGSNSVLETNDPTAHAEIVAIRDACRNLGHFQLDGCEVYTSCEPCPMCLGAIYWARPSKVFFANDKRDAAEAGFDDDFIYQELELPYEKRKIPFEQGMQDTAKEVFQEWILKEDKTLY

SEQ ID NO: 138 - protein, 196 aa, synthetic construct
  REGION 1..196: note = pYY-BEM4.29; tr|R4XI84|R4XI84_TAPDE polypeptide sequence
MSSEIEPPSTDVHKHAVAEAADESGAADAFMQIALQQAETALLNKEVPVGCVFVHQPTGTVLATGANQTNASLNGTLHAEFVAIESILRDHPPSIFRESDLYVTVEPCVMCASALRQLQVRKVYFGCGNDRFGGCGSVFSIHSDASKTGDAAYMVESGIFRKEAIMLLRRFYLLQNESAPKPALKSTRVLKEHFDE

SEQ ID NO: 139 - protein, 212 aa, synthetic construct
  REGION 1..212: note = pYY-BEM4.30; tr|A0A239CVF7|A0A239CVF7_9DELT polypeptide sequence
MSPASKKHFPSLFSFLLLTIGLICGTAHAQPQGHTADDTAATLANASLKEHEPFIRRCYQLAIDAGKKGNHPFGALLVHKGKIVLEAENTVLTDNDFTNHAEMNLIAEAARTLSRQIIPEATVYTSCAPCAMCTATLAMAGFTRIVYGVSHDALNKRFGLKGKSVSCPALFKTMGMELEFVGPVLEKEGLRVFDFWPEKDPHAQMLKKQARK

SEQ ID NO: 140 - protein, 320 aa, synthetic construct
  REGION 1..320: note = pYY-BEM4.31; tr|A0A1Q3NME1|A0A1Q3NME1_9BACT polypeptide sequence
MTEFNYDWAKLAFSSKRPLTNLKATFIIAPREISEKRFTQLLKEYLPKGDILLGISKEDYVEGLEGQPQFAMLQQKTLQKLIDKVNDASAHKVYTLRYFQRELPAIIEKLTPPRVVGIHGSWHHSFHTLPIYYLLSEKRIPYQLVAAFSDEDEARAYEVATDKKIVRPTLEGSFDDTTVLQLTDEVAKSSYDYGFQTGAILAEKVNGVYQPVAAGFNKVVPYQTYALLNGASRETNFSPANDMNHYDTIHAEMQILVEAAKQGISLKDKTLFVNLMPCPSCARTLSQTELSEIVYRIDHSGGYAVDLLTKVGKDIRRIVY

SEQ ID NO: 141 - protein, 180 aa, synthetic construct
  REGION 1..180: note = pYY-BEM4.32; tr|A0A2G6N4N7|A0A2G6N4N7_9DELT polypeptide sequence
MKERTVSYSDRHFMAEALEMAESALTQGEFPVGCVIADGTAVVARGHRTGTTAGAVNEIDHAEINALRHLGLAGEHLDRTDLTIYSTMEPCLMCFAAIVLSGINRIVYAYEDVMGGGTGCDLTGLPPLYRDAPLTLVAGVRRRASLNLFRRFFTDPENGYWAGSLLSRYTLNQTKDSHRL

SEQ ID NO: 142 - protein, 156 aa, synthetic construct
  REGION 1..156: note = pYY-BEM4.33; tr|A0A0G0RBB8|A0A0G0RBB8_9BACT polypeptide sequence
MQSVQYNKLTHLQRRALDEAEQVLENSYNPYSHFYVGACLISEDEQLIAGTNFENAAYGSAICAERAAVLRANAMSIRRFRGIAIIARGEDFNTTEVTGPCGSCRQVLYEISQVSGCDLQVILATSKKDKIVITTIRELLPLAFGPLDLGVDIGKY

SEQ ID NO: 143 - protein, 217 aa, synthetic construct
  REGION 1..217: note = pYY-BEM4.34; tr|A0A327L2Q5|A0A327L2Q5_9RHIZ polypeptide sequence
MVTSRDGEDEAMMARCVALSRIAVGKGEYPFGAVVAREGRIVAEAINRTIRDGDVSRHAEVIALARAQKAIGRRELRECSLYSNVEPCAMCSYCIREAWVGRVVYALGSPVMGGVSKWNILRDDGLSGRMPQVFDAAPEVVSGVLVEQAQAAWRDWSPLAWEMITLRGLMTDPSARPECRTRAARPRSLWHHLVALIERPPRPYVDPTSAAEGHADL

SEQ ID NO: 144 - protein, 162 aa, synthetic construct
  REGION 1..162: note = pYY-BEM4.35; tr|S2DR30|S2DR30_9BACT polypeptide sequence
MKMKKKIEITVSLEVIQKSEWSKEDRSLIERAIHAVEHAHAPYSNFMVGTALLLDNGQIFSANNQENVSFPVGICAERAVLSYAMGNFPNNRPVKLAVVAKRRSDSTWATVTPCGLCRQTINEYEVKFGHPIEILMLNPGEEILKASGIDQLLPFRFNDLNS

SEQ ID NO: 145 - protein, 153 aa, synthetic construct
  REGION 1..153: note = pYY-BEM4.36; tr|A0A369QGF1|A0A369QGF1_9BACT polypeptide sequence
MEEHEKWMHWCLNLAQQALQQGDFPVGAVVVQKGKLIGQGVEAGQLKKDITCHAEMEAIRDARQTINTADLQNCILYSTHEPCIMCSYVIRHHKISRVVVGTTVPEVGGSSSAYPLLSAPDISIWVAPPHLVTGVLAEACQALSQAYKQKFKK

SEQ ID NO: 146 - protein, 159 aa, synthetic construct
  REGION 1..159: note = pYY-BEM4.37; tr|A0A1W6X4U4|A0A1W6X4U4_9RHIZ polypeptide sequence
MTNPSRQERWDRRFLELAKVFGTWSKDRSAGTGCVIVGPDRLLRASGYNGFARGIDDEVPERHERPAKYSWTEHAERNAIYNAAKLGISLDGCTAYVNWFPCIDCARAIVQAGIVRLVGLHPDHADQRWGSEFKFATEMLRESGIEIILYDIPELAARK

SEQ ID NO: 147 - protein, 490 aa, synthetic construct
  REGION 1..490: note = pYY-BEM4.38; tr|A0A238BW09|A0A238BW09_9BILA polypeptide sequence
MEEMARKIRTKAKKANSYCNTMTFLISKASIVLLKAECKRIELTVVIFRFLIKMNASEPNNELCDMTVIKSMLKITHVIFDLDGLLIDTEVVFSKVNQCLLSKYNKKFTPHLRGLVTGMPKKAAVTYILEHEKLSAKVDVDEYCKKYDEMAEEMLPKCSLMPGVMKLVRHLKTHSIPMAICTGATKKEFEIKTRYHKELLDLISLRVLSGDDPAVKRGKPAPDPFLVTMDRFKQKPEKAENVLVFEDAANGVCAAIAAGMNVIMVPDLTYMKIPEGLQNKINSFSDNLIISNDLNVALMSLKKELSEEEVHFLNRAFEIAVDAVLNNEVPVGCVFVFEGQEVAFGRNDVNRTKNPTYHAEMVALKMMKQWCMDNGRDLEEIMRRTTLYVTLEPCIMCASALYHLRLKKILYGAANERFGGLVSVGTREKYGAKHFIEIMPNLSVDRAVKLLKEFYEKQNPFCPEEKRKVKKPKKSGNNNDNSDDAVALNV

SEQ ID NO: 148 - protein, 159 aa, synthetic construct
  REGION 1..159: note = pYY-BEM4.39; tr|A0A1J5H6Z0|A0A1J5H6Z0_9BACT polypeptide sequence
MAYQPSEKFMQMAIDKTREGVLSGQTPFGACIVKDGKVVACEHNTVWQDTDITSHGEVHTIRAACKAIGSIDLSGCILYSTCEPCPMCFSAIHWARIDTVVYGAFIADAQDAGFNELTISNEKMKEFGGSPVNFISGFMRDENVALFKLWKEQGANNVY

SEQ ID NO: 149 - protein, 168 aa, synthetic construct
  REGION 1..168: note = pYY-BEM4.40; tr|A0A3C2D945|A0A3C2D945_9BACT polypeptide sequence
MKTTEIRIIVHEYQNIDELTENDQYLLHEARRITEFAYAPYSGFHVGAAILLGNGMIVKGNNQENSAYPSGLCAERVALFYANANYPDSEVKTIAISAAKNGILVNDPIKPCGGCRQTLSEAEVRFGSPIRIILDGQDSILVLHGVESLLPLSFSKKDLASPLAATGR

SEQ ID NO: 150 - protein, 214 aa, synthetic construct
  REGION 1..214: note = pYY-BEM4.41; tr|A0A1I7EYS3|A0A1I7EYS3_9BURK polypeptide sequence
MKFKLDPSRPPDEDDYYLGVALAVRRKANCTGNRVAAVIVKNKRVIATGYNGVPEDMPNCLDGGCLRCSNPGGQFKSGTRYDLCICVHAEQNALLTAARFGISVEGAHLYTTMQPCFGCAKEILQAKIEKVFYLHPWVPTDVDPVMDAAMKAEYAKIIGKLKVKKLDFDDPVATWAVTTMRQAALASDKNPDKKTPPKTAKKKVAKKKSRTSPR

SEQ ID NO: 151 - protein, 155 aa, synthetic construct
  REGION 1..155: note = pYY-BEM4.42; tr|H8GQX8|H8GQX8_METAL polypeptide sequence
MNHEHFMRRAIELARQAPQYPFGAVIVRRDDGQCVGQGFNRSDLNPTYHGEMVAINDCAVRHCAEDWRGFDLYTTAEPCAMCQGAIEWAGIGRVFYGTSIPYLQKLGWWQIDLRAAEVSARAVFRDTLIVGGILETECNALFAAARRGCFGTGSE

SEQ ID NO: 152 - protein, 156 aa, synthetic construct
  REGION 1..156: note = pYY-BEM4.43; tr|A0A0S8HZN3|A0A0S8HZN3_9CHLR polypeptide sequence
MDEHDIRFLRASFDVARNARKNGNHPFGALLVDEHGRIVMEAENTVITAKDCTGHAETNLMREASSKYDSDFLANCTIYTSTEPCPMCAGAIFWSNVRRVVYGLSEESLYEIAGRGSEEVLFLSCREIFERGKKLIEVIGPLLEDEAREVHMGFWR

SEQ ID NO: 153 - protein, 193 aa, synthetic construct
  REGION 1..193: note = pYY-BEM4.44; tr|E3SF31|E3SF31_9CAUD polypeptide sequence
MKPTTVLQIAYLVSQESKCCSWKVGAVIEKNGRIISTGYNGSPAGGVNCCEHAEEQGWLLNKPKPVLIPGHKSECVRFSQVDRFVLAKAHREAHSAWSKNNEIHAELNAILFAARMGSSIEGATMYVTLSPCPDCAKAISQSGIKKLVYCETYDKNIPGWDDILKNAGIEVFNVPKRSLDKLNWENINEFCGE

SEQ ID NO: 154 - protein, 330 aa, synthetic construct
  REGION 1..330: note = pYY-BEM4.45; tr|F8AAC6|F8AAC6_THEID polypeptide sequence
MIRAPWHEYFMLLAKIVALRSGCNSRPSGAVIVKNKRILATGYNGPMPGAWHCTDRGPGYCFRREKGIPDIDKYNFCRATHAEANAIAQAARFGISVEGASLYCTLAPCYVCLKLIASAGIKKVYYEHDYGSRDFERDQFWKEAIKEAGLEKFEQITVSQEVMEQLQEILPYPTSKRRLAPTEFLDEFEDGKKYGVPSIEVLFNKLNYLTRQALKDITFVIEKTTVTEEPEGISFYLSGKMVELSELINTVKKQINADQNFYFLAKHNAIEAKIEILREAENIRLKAFLNECPLESFKRIAESLDYILYQVSNSLSLPTRLELSVNLLRI

SEQ ID NO: 155 - protein, 158 aa, synthetic construct
  REGION 1..158: note = pYY-BEM4.46; tr|A0A2H4ZNK4|A0A2H4ZNK4_9EUKA polypeptide sequence
MKKQLSRKIQEEWMSRLLRNAYDAGTYGEVPIAAVILNESGQCIGWGRNCREKDQNPLGHAEIIALRQASYLKKSWRFNECTMLVTLEPCPMCAGALLQARINHIIYGASDYKRGGFGGVLDLSKNSSAHHKIEITRGVKSIQSCQLLETWFRRRRRV

SEQ ID NO: 156 - protein, 176 aa, synthetic construct
  REGION 1..176: note = pYY-BEM4.47; tr|A0A239N5N1|A0A239N5N1_9PSED polypeptide sequence
MEGRAGIIPFDEGGAAMGPAEEDSPMQHLAYMREALALARANVEAGGRPFGAVLVRDGEVIARAANGTHLDHDPTAHAELLALRAAGRALGSPRLDGCVVYASGHPCPMCLAAMHLSGVSAAYYAYSNADGEPYGLSTAAVYAQMAQPVEWQSLPLQALRPEDEEGLYGFWRERRP

SEQ ID NO: 157 - protein, 199 aa, synthetic construct
  REGION 1..199: note = pYY-BEM4.48; tr|A0A328VTR2|A0A328VTR2_9PSED polypeptide sequence
MHPEHLALLQQAPASTHADDTWARLCCEQALLAVEEGCYAVGALLVDGAGELLCSGRNQVFAPAYASAAHAEMRVLDQLEAEHAQVDRRSLTLYVSLEPCLMCYGRILLAGITRVRYLARDRDGGFALRHGRLPPAWANLASGLSVVQAKADPYWLDLAEHAIGRLQDRQTLRQRVIRAWRGQRTLTDEFSSTKRTHSG

SEQ ID NO: 158 - protein, 402 aa, synthetic construct
  REGION 1..402: note = pYY-BEM4.49; tr|A0A103YG48|A0A103YG48_CYNCS polypeptide sequence
YIRELHASSLRRDEHEIQNPKILVIVDRLSSPSLHVSLSLSLSLVIFPPFIPLNQTPTHMENAKVVEAKDGTIAVASAFSGHQEVVQDRDHKFLTRAVEEAYKGVECGDGGPFGAVVVHKDEVVASCHNMVLKHTDPTAHAEVTAIREACKKLNKIELSDCEIYASCEPCPMCFGAIHLSRIKRLIYGAKAEAAIAIGFDDFIADALRGTGFYQKAHLEIKQADGNGAMIAEQVFEKTKAKFAIDHKFLTRAVEEAYKGVECGDGRPFGALVVHKDEVVVSCHNMVLNYTDPTAHAEITAIREACKKLNRIELSDCEMYSSCEPCPMCFGAIQISRIKRLVYGAKAEASIASGIPIGDFISDALKGTGFHEKANFEIKQADGNGAMIAEQVFERTKAMFPKR

SEQ ID NO: 159 - protein, 195 aa, synthetic construct
  REGION 1..195: note = pYY-BEM4.50; tr|W5M1M8|W5M1M8_LEPOC polypeptide sequence
NSSTRESRVMAQMEINGGASPPKKPGKGQSAADQDMITGLINKALQAKEFAYCPYSNFRVGAALMTNDGRVFTGCNVENACYNLGVCAERTAILKAVSEGYESFRAIAVSSDLQDQFISPCGACRQVMREFGTGWDVFLTKVDGSYVRMTVDELLPMSFGPDDLKKKKVFSLQNGHEVSTQFYTHSPCEAGENNN

SEQ ID NO: 160 - protein, 134 aa, synthetic construct
  REGION 1..134: note = pYY-BEM4.51; tr|A0A3N5YPZ2|A0A3N5YPZ2_9ALTE polypeptide sequence
MSNSETEHIQALVDAAQAAQKQSYSPYSSFQVGAAIFADDGNTYSGCNIENVAYPLGQCAEATAIGMMIMQGAKRIEDIMIASPNDQVCPPCGGCRQKISEFGTAETKIHMVTRSGEVSTVTLGELLPLAFDSL

SEQ ID NO: 161 - protein, 162 aa, synthetic construct
  REGION 1..162: note = pYY-BEM4.52; tr|A0A2A9NC86|A0A2A9NC86_9AGAR polypeptide sequence
MTNSTLSNEDRTRLIQGAFQARKKTYSPYSNFPVGAALLTTDGRIIEGANIENASYGGTICAERTAIVKAVSDGYRHFAGIAVTTKMPTRVSPCGICRQVLREFCSLDMPVLLVPGDYPQRNPVDDDGADKPGVITEGGVRETTLGALLPDSFGPENLPPRA

SEQ ID NO: 162 - protein, 163 aa, synthetic construct
  REGION 1..163: note = pYY-BEM4.53; tr|A0A2D6RD43|A0A2D6RD43_9GAMM polypeptide sequence
MNIENLITENDETLIRRCIELAGESVKNGDKPFGALLAKDGNIIFESSNNAKTKVPYHAEILTLMDAQDKLNTTDLSDYALYSNCEPCPMCSFMIREYKLDKVVFSVHSPYMGGQSRWNILEDDVLTRFKPYFSKPPNVVGGVLESEGKRIFDKVGLWMFGKE

SEQ ID NO: 163 - protein, 204 aa, synthetic construct
  REGION 1..204: note = pYY-BEM4.54; tr|A0A0H3AVL6|A0A0H3AVL6_BRUO2 polypeptide sequence
MHAKGYSQQERRIIPFANRFRFRELCSNKSLHGLRAKFPEQYTKWDPMRKAASITKANSATPMDIALEEAHAAGERGEVPIGAVIVRDGEIIARAGNRTREFNDVTAHAEILTIRQAGEMLGSERLIDCDLYVTLEPCAMCAAAISFARIRRLYYGASDPKGGGIEHGGRFYTQPTCHHAPEIYPGFCEADARKILKDFFREKR

SEQ ID NO: 164 - protein, 165 aa, synthetic construct
  REGION 1..165: note = pYY-BEM4.55; tr|A0A242H531|A0A242H531_9ENTE polypeptide sequence
MFIVKNNIEVIQQQAELDAKFMKQALKLAKDASNNGNEPFGAVLVKNDKVILTGENQIHTESDPTYHAELGIIRDFCTSQKITDLSEYTLYTSCEPCCMCAGAMVWSNLDRMVYGLGHDELAEIAGFNIMIGSEEIFSKSPNRPEVAKGVLKEAAVPVYVDYFQR

SEQ ID NO: 165 - protein, 181 aa, synthetic construct
  REGION 1..181: note = pYY-BEM4.56; tr|A0A2R6XZE2|A0A2R6XZE2_9BACL polypeptide sequence
MSGRISWHEYFMAQAKLIALRATCTRLMVGAVIVRDRRVIAGGYNGSIAGDEHCIDVGCKVRDGHCIRTIHAEQNALMQCAKFGVSTDGAELYVTHFPCLNCTKLLIQAGIRHIYYEVPYRVDPYAIELLEKAGVGTTQITVDLNAYVQVMSKVSTDPALTYVPESKAQKDEYGQSVGKIV

SEQ ID NO: 166 - protein, 173 aa, synthetic construct
  REGION 1..173: note = pYY-BEM4.57; tr|A0A139SHT6|A0A139SHT6_9BACT polypeptide sequence
MSEANASSESLPSRNSPVELIAEAAGKFGRRPTWDEYFMATAVLISTRSSCERLNVGCVIVTAGESHKNRIVAAGYNGHLPGSPHTSRMRDGHEQATVHAEQNAISDAARRGSSVEGCTAYVTHYPCINCAKILASAGIAKICYRLDYHNDPLVKPMLAEAGIEIVQLGEAAS

SEQ ID NO: 167 - protein, 170 aa, synthetic construct
  REGION 1..170: note = pYY-BEM4.58; tr|A0A261DBH2|A0A261DBH2_9RICK polypeptide sequence
MVMKKKLITVKRSTEFNNFFMEEALKQAQFALDKNEIPVGAIIVNRITNKVIAKAHNIVEQTKNPVLHAEIVAINQSCQILSSKNLSDCDMYVTLEPCVMCSGAISFARIGRLFYAANDPKQGAIENGGRFFNSKSCFYRPEIYSGFSAKISENLIKEFFYNVRYQKCNP

SEQ ID NO: 168 - protein, 146 aa, synthetic construct
  REGION 1..146: note = pYY-BEM4.59; tr|A0A2N0XZK6|A0A2N0XZK6_9VIBR polypeptide sequence
MTDNSLHESYMRQAFELSKSALPGCRPNPPVGCVFVKDGEVVSSGFSQPPGNHHAEAGAIAAYTGSYDGLVAYVTLEPCSFQGRTPSCAKALVRVRPEKVYVAILDPDTRNSGAGIKILEDAGIDVEVGLLGEEVASFLNPYLIRN

SEQ ID NO: 169 - protein, 159 aa, synthetic construct
  REGION 1..159: note = pYY-BEM4.60; tr|A0A1V5R0F9|A0A1V5R0F9_9BACT polypeptide sequence
MTKKETTKLHALDDFCMKKALLLAKRAFRADEVPVGALVVDSSNKVIGRGYNQVEKRKSQRAHAEQLAIEQACKKIGDWRLEGCTLYVTLEPCTMCMGLIKLSRIERVVFGAASPLFGYQLDKNRKSQLYKKGVIKIRKGVGKATAAALLKDFFKNKRM

SEQ ID NO: 170 - protein, 167 aa, synthetic construct
  REGION 1..167: note = pYY-BEM4.61; tr|A0A2W0H8Y3|A0A2W0H8Y3_9BACI polypeptide sequence
MKNNGRLDHEYFMTEALQEAKEAGQRGDLPIGAVIVHNGRIIARGSNMRKTAGIKISHAENNAMHNCAPYLMKHASECVIYTTLEPCIMCLTTLVMANIDSIVFAADDKYMNMKPFIDANSYIRDRIHQYKGGVCRGESEALLRKYSPYAAELALNGTHPHHRKGGA

SEQ ID NO: 171 - protein, 165 aa, synthetic construct
  REGION 1..165: note = pYY-BEM4.62; tr|A0A261BDB7|A0A261BDB7_CAERE polypeptide sequence
LYKLYIFRMTTTKANLTQFEQELVDKAVGAMEKAYCKYSGFKVGAALVCEDGEIIIGANHENASYGATICAERSAMVTALTKGHRKFKLLAVATELEAPCSPCGICRQYLIEFGDYKVILGSSTSDQIIETTTYGLLPYAFTPKSLDDHEKEAEERNHQEGEKKH

SEQ ID NO: 172 - protein, 162 aa, synthetic construct
  REGION 1..162: note = pYY-BEM4.63; tr|A0A2E1PHI6|A0A2E1PHI6_9GAMM polypeptide sequence
MKELLIHSWLMLNSNSKLIMERVIELSEINLKNGKIPIAAVIVDKKNYEIISESQNEDSPIGHAELLAITKALKKLNTNRLDSTNLFVTIEPCPMCAYAISKCHINRLYFGSEDEKGGGVINGPRIFESHNLKKIDYVSHCYHEKTTQLMQSFFQLKRNQQL

SEQ ID NO: 173 - protein, 133 aa, synthetic construct
  REGION 1..133: note = pYY-BEM4.64; tr|A0A378LUA7|A0A378LUA7_9GAMM polypeptide sequence
MDTIIKKMISNAHNTLAHSYSPYSKFSVASCICTDKDNFYTGVNVENSAYGLAICAETSAISAMVTAGEKRIKSMVVMAGTNILCSPCGACRQRIYEFSTPDTLIHLCDKNSILRTFKINELLPEAFKFDFNP

SEQ ID NO: 174 - protein, 370 aa, synthetic construct
  REGION 1..370: note = pYY-BEM4.65; tr|A0A139HQ78|A0A139HQ78_9PEZI polypeptide sequence
MADSLKSKPGHARHDTALIHGLSQSDVQKLSESCVDAKSKAYCPYSHFRVGCAVLLANGDVVQGANVENAAYPVGTCAERVALGTAVGAKKGDFRALAVSTDISPPASPCGMCRQFIREFCELNTPILMYDKDGKSVVMTLEQLLPMSFGPDKLLPPGQLENGLMQTQTQSSFVTRAFSTTSSRRQDDTPQVPQSHYDFFPQTFPQGPPPKTSFSPDLKQLRKEFLQLQAKAHPDLAPQDQKRRAEALSMRINEAYKTLQSPLRRAQYLLSQQGIDVEDETAKLDDSSLLMEVMEAREAVEEVEDEEQLNEIRAENNGRIEESVRVLEDAFRDNEFEKAAQEAIRLRYWVNIEESIQGWEKGNGGGILHH

SEQ ID NO: 175 - protein, 165 aa, synthetic construct
  REGION 1..165: note = pYY-BEM4.66; tr|A0A2A9FXV0|A0A2A9FXV0_9VIBR polypeptide sequence
MCNLKENKDMDKYFHFACDATIEGMREGTGGPFGATLTRNGEVVCSVANTVLKDMDISGHAEMVAVREACKKLDTLDLSDCVMYATCEPCPMCVSVMLWAGIKTCYYASTHLDAAKHGFSDQQLRDYLDGSDTSTLNMVHIEDNRDDCAKIWTEFRHLNETKNDG

SEQ ID NO: 176 - protein, 509 aa, synthetic construct
  REGION 1..509: note = pYY-BEM4.67; tr|A0A1A8AG96|A0A1A8AG96_NOTFU polypeptide sequence
MEHSDRWSRAEPGLSTSSRETRDGSTQTDCKLQGHGPRLSKVNLFTLLSLWMELFPQEQDEENGQSQIRRSGLVVVREGKVVGLHCSGADLHAGQAAILQHGASLANCQLFFSRRPCATCLKMIINAGVRQITFWPGDPEISMLTSNQTHSQRTSQSITEASLDATAVEKLKSNSRPQICVLMQPLAPGVLQFVDETSRRSDFMERMMDDDPELDSEKLFNSDRLRHLKDFCRHFLIQTDQRHKDILSQMGLKNFCVEPYFSNLRSNMTELVEVLAAVAAGMPQQHYGFYREESLSLDPHPVDVSQAVARHCIVQARLLSYRTEDPKVGVGAVIWAKGQSACCCGTGRLYLIGCGYNAYPAGSKYAEYPQMDNKQEDRERRKYRYIVHAEQNALTFRTRDIKPDECSMLFVTKCPCDECIPLIRGAGVKHIYTSDQDRDKDKGDISYLRFGSLKGVCKFIWQRSPPVSSASSLHLTNGCVGKHVRQAEQQIYKNKKLCTKGSSGSSDIC

SEQ ID NO: 177 - protein, 148 aa, synthetic construct
  REGION 1..148: note = pYY-BEM4.68; tr|A0A3E2VN88|A0A3E2VN88_9FIRM polypeptide sequence
MEKEITNMDKQKLIQMAVDGLGRSYAPYSHFHVSAALLCADGTVYTGNNIENAAYTPSVCAERCAIFKAVGDGRREFEAIAVCGGPDGVIEDYCPPCGVCRQVMREFCDPSSFRVLVAKTAEDYREYTLEQLLPDGFGPDHLTGSGER

SEQ ID NO: 178 - protein, 221 aa, synthetic construct
  REGION 1..221: note = pYY-BEM4.69; tr|A0A2D5ZRJ2|A0A2D5ZRJ2_9BACT polypeptide sequence
MARPVHLHTGERRTEEGATESRAVAAVATAITRAPRAPPRPATGRERDGPPPRRVFGGGLRVGDPSGYDRGESKPIGGPLTEKRSDWHSYFMRIAGEVATRATCDRKHVGAVIVRNRTILSTGYNGSIRGMPHCDDVGHDMVDGHCIATIHAEANAILQAARNGVMIQDGSIYITASPCWNCFKLVANAGLKRVYYGEFYRDKRSFEVARRLGIDLMHIEV

SEQ ID NO: 179 - protein, 155 aa, synthetic construct
  REGION 1..155: note = pYY-BEM4.70; tr|A0A1B8WPS3|A0A1B8WPS3_9BACI polypeptide sequence
MEGVQLIYQFQWGNLIMTVNKEDLYLIDVARNTIKTLYVDGKHHVGAAVRTKTGKIYSAVHLEANIGRVSVCAEAIALGKAISEGESEFDTIVAVRHPDPTQENQKIEVVSPCGICRELISDYGKGTNVILKNKEGYIKTVISDLLPNKYIREDN

SEQ ID NO: 180 - protein, 156 aa, synthetic construct
  REGION 1..156: note = pYY-BEM4.71; tr|A0A1W5ZQK9|A0A1W5ZQK9_9BACI polypeptide sequence
MNRFMERAVSLAAENVRVGGQPFGAVLVKDDELVAEGVNEMHLNYDVSGHAELLAIRRAQGELQTHDLSGYTMYASGEPCPMCLSAMYFAGIKDVFYCATVEEAAQVGLEKSKNVYDDLQKSKGERSLVMKQMPLEDDQEDPMKLWDERTNHNGTS

SEQ ID NO: 181 - protein, 340 aa, synthetic construct
  REGION 1..340: note = pYY-BEM4.72; tr|A0A378V0W4|A0A378V0W4_MYCFO polypeptide sequence
MVHAQFDPTARQALAATAVEAKTRKDLTWQQIADAAELSPAFVTAAVLGQHALPARSAEAVAALLGLDDDAALLLQTIPIRGSIPGGIPTDPTIYRFYEMLQVYGTTLKALVHEQFGDGIISAINFKLDVRKVADPEGGERAVITLDGKYLPPNPFDRVRYRGGLMDFAQRTIDIARQNVAEGGRPFATVIVKNGEILAESPNLVAQTHDPTAHAEILAIRKACTRIGTEHLIGATIYVLAQPCPMCLGSLYYCSPDEVVFLTTRDAYEPHYVDDRKYFELNMFYDEFAKPWDQRRLPMRYEPRDAAVDVYKLWQERNGGERRVPGAPTSTRPGKNPRGE

SEQ ID NO: 182 - protein, 157 aa, synthetic construct
  REGION 1..157: note = pYY-BEM4.73; tr|I3XF03|I3XF03_RHIFR polypeptide sequence
MKQRCMSPKSAQRFWDNDMHNNKDRPMSENELFVAAREAMAKAHAPYSKFPVGAAIRAEDGQIYTGANIENLSFPEGWCAETTAISHMVMAGQRKIMEVAVIAEKLALCPPCGGCRQRLAEFSGASTRIYLCDETGIKKSLALSDLLPHSFETEILG

SEQ ID NO: 183 - protein, 595 aa, synthetic construct
  REGION 1..595: note = pYY-BEM4.74; tr|F8IEF3|F8IEF3_ALIAT polypeptide sequence
MDAKELETRGWLCMRAVDVIDKKRRGEALAEEELRFLIEGYVAGRIPDYQMSAFLMAVVWRGMTREETLVLTRLLADSGERLDLSGIPGVKVDKHSTGGVGDKATLVVLPLVASIGVPVIKMSGRGLGHTGGTIDKLESIPGFRTDLSVAELVAQVRQVGIALGGQTADLAPADKKLYALRDVTGTVESLPLIASSVMSKKLAGGADAIVLDVKVGDGAFMKSRSDARRLARLMVEIGEAAGRRTVAVLSNMDQPLGCAIGNALEVAEAIRVLSGEGPFDLAEIALALAEEMTVLAGVAATREEARRMLRQSVAEGRALETLRRWIAAQGGDPAVVDDPSRLPQAPVQMPYLPKKAGFVAKLSALAFGLAAMRLGAGRETKEEAIDPSVGIVLHAKVGDRVQTHRPMFTVHARTGEDALRCIQELEAAIQISDDPVEAPPLILARIDRSEALPYADLMDAAREARDRAYVPYSGFAVGAALELADGRMVTGANVENASYGLTNCAERSAVFRAVAEGGPGTKPEIRAVAVIADSPEPVSPCGACRQVLAEFCSPDTPVYLGNLQGDVRETTVGALLPGAFTDAQMANVRRQDKEA

SEQ ID NO: 184 - protein, 153 aa, synthetic construct
  REGION 1..153: note = pYY-BEM4.75; tr|A0A1G3M638|A0A1G3M638_9SPIR polypeptide sequence
MKTTNINALDKWDLRFLQMAEHVAEWSKDPSTKVGAVIVRPDRTIASVGFNGFARGVRDTVERLWNRELKYPLTVHAELNAILSAHEPVRGHSLYVSPLSPCSNCAGVIIQSGIARVVAKCGQVNNPAQWSESFNLALTAFAEAGVSVILVEH

SEQ ID NO: 185 - protein, 177 aa, synthetic construct
  REGION 1..177: note = pYY-BEM4.76; tr|A0A3D9LFR2|A0A3D9LFR2_9MICC polypeptide sequence
MEQNDHGSSGAFSDPFEDDIPLTASLPRITGTGSGIDWQRLESTARAAMTRAYVPYSRFPVGAAALVEDGRVVAGCNIENASLGLTLCAECSLVSNLQMSGGGRIVAFYCVDGNGEVLMPCGRCRQLLYEFHAPGMRLMGPDGELTMDEVLPLAFGPADMTHLSDSAASTDDPGRTR

SEQ ID NO: 186 - protein, 172 aa, synthetic construct
  REGION 1..172: note = pYY-BEM4.77; tr|A0A3B9YGB5|A0A3B9YGB5_9BACT polypeptide sequence
MAKPISKKYRKLIETAKAARKKAYSPYSRYQVGAAVLTESGRIYSGANMENASYGLCMCAERVAIANAVTRGEKVLQAVCVVGKKARPCGACRQVMLEFSTKETELLMVDIDPNARRDTVIRTRVYSMLPNPFDPFESGMLPQHPQNLLRRRKSPQPRRKRRSRPVHREVSR

SEQ ID NO: 187 - protein, 391 aa, synthetic construct
  REGION 1..391: note = pYY-BEM4.78; tr|A0A182F569|A0A182F569_ANOAL polypeptide sequence
MPRPSQFRVSSSQSLSNSQIQASQSSDSVVDITSYVNAVVKALLNLSCTKTIIKRADLVNIALKGNGRLIGRVLQDANIELKEIYGYELIEVEKSKTMILCSTLAAGSMDELNDANRRRYTFLYLILGYIFMKNGSVPETIVWEFLETLGIEEQQEHNYFGDVRKLYDSLFKQAYLTRTKQALEGLNDDVMLISWGVRSKHEVSKKDILAGFCKVMNRDPVDFKAQYIEANEKDDKMNNNINGTVDGRNTVEYSSLDASVKELIEAAIKVRNNAYCPYSNFAVGAALRTVGGDIVTGCNVENGTFGPSVCAERTAVCKAVSEGHREFTAVAVVAFQETEFTAPCGTCRQTLSEFSRKDIPIYLVKPSPVRVMVTSLFQLLPHAFSPSFLNK

SEQ ID NO: 188 - protein, 151 aa, synthetic construct
  REGION 1..151: note = pYY-BEM4.79; tr|A0A264Z0D4|A0A264Z0D4_9BACI polypeptide sequence
MEPKKLIEEAIVASKQAYVQYSNFHVGAALLTKDGKLYHGCNIENASYGLTNCAERTAIFKAVSEGEKEFQAIAVVGDTEGPISPCGACRQVLAEFFSPDTVVILANLKGDHVVTNINELLPGFFSSKDLQKKVKNCFEKNALGSSCLRPI

SEQ ID NO: 189 - protein, 229 aa, synthetic construct
  REGION 1..229: note = pYY-BEM4.80; tr|A0A1L9Q1R3|A0A1L9Q1R3_ASPVE polypeptide sequence
MPLSAEEAALVETATATINSIPLSEDYSVASAAKASDGRVFTGVNVYHFTGGPCAELVVLGVAAAAGAAQLTHIVAVANEQRGILSPCGRCRQVLLDLQPNIQVIVGKEGSEQSVPVAQLLPFSYRQPDQHTPVIFKALTSSGPVVVDFFATWCGPCKAVAPVVGKLSETYTDVRFIQVDVDKARSISQEHDIRAMPTFVLYKDGKLLDKRVVGGNMKELEEQIKAIIA

SEQ ID NO: 190 - protein, 18 aa, synthetic construct
  REGION 1..18: note = synthetic peptide
KRTADGSEFESPKKKRKV

SEQ ID NO: 191 - protein, 16 aa, synthetic construct
  REGION 1..16: note = synthetic peptide
KRPAATKKAGQAKKKK

SEQ ID NO: 192 - protein, 17 aa, synthetic construct
  REGION 1..17: note = synthetic peptide
KKTELQTTNAENKTKKL

SEQ ID NO: 193 - protein, 19 aa, synthetic construct
  REGION 1..19: note = synthetic peptide
KRGINDRNFWRGENGRKTR

SEQ ID NO: 194 - protein, 16 aa, synthetic construct
  REGION 1..16: note = synthetic peptide
RKSGKIAAIVVKRPRK

SEQ ID NO: 195 - protein, 7 aa, synthetic construct
  REGION 1..7: note = synthetic peptide
PKKKRKV

SEQ ID NO: 196 - protein, 30 aa, synthetic construct
  REGION 1..30: note = synthetic polypeptide
MDSLLMNRRKFLYQFKNVRWAKGRRETYLC

SEQ ID NO: 197 - protein, 1368 aa, Streptococcus pyogenes [sequence omitted]

SEQ ID NO: 198 - DNA, 4104 bp, Streptococcus pyogenes
  misc_feature 1..4104: note = wild type spCas9 polynucleotide sequence
  source 1..4104: mol_type = genomic DNA
atggataagaaatactcaataggcttagatatcggcacaaatagcgtcggatgggcggtgatcactgatgattataaggttccgtctaaaaagttcaaggttctgggaaatacagaccgccacagtatcaaaaaaaatcttataggggctcttttatttggcagtggagagacagcggaagcgactcgtctcaaacggacagctcgtagaaggtatacacgtcggaagaatcgtatttgttatctacaggagattttttcaaatgagatggcgaaagtagatgatagtttctttcatcgacttgaagagtcttttttggtggaagaagacaagaagcatgaacgtcatcctatttttggaaatatagtagatgaagttgcttatcatgagaaatatccaactatctatcatctgcgaaaaaaattggcagattctactgataaagcggatttgcgcttaatctatttggccttagcgcatatgattaagtttcgtggtcattttttgattgagggagatttaaatcctgataatagtgatgtggacaaactatttatccagttggtacaaatctacaatcaattatttgaagaaaaccctattaacgcaagtagagtagatgctaaagcgattctttctgcacgattgagtaaatcaagacgattagaaaatctcattgctcagctccccggtgagaagagaaatggcttgtttgggaatctcattgctttgtcattgggattgacccctaattttaaatcaaattttgatttggcagaagatgctaaattacagctttcaaaagatacttacgatgatgatttagataatttattggcgcaaattggagatcaatatgctgatttgtttttggcagctaagaatttatcagatgctattttactttcagatatcctaagagtaaatagtgaaataactaaggctcccctatcagcttcaatgattaagcgctacgatgaacatcatcaagacttgactcttttaaaagctttagttcgacaacaacttccagaaaagtataaagaaatcttttttgatcaatcaaaaaacggatatgcaggttatattgatgggggagctagccaagaagaattttataaatttatcaaaccaattttagaaaaaatggatggtactgaggaattattggtgaaactaaatcgtgaagatttgctgcgcaagcaacggacctttgacaacggctctattccccatcaaattcacttgggtgagctgcatgctattttgagaagacaagaagacttttatccatttttaaaagacaatcgtgagaagattgaaaaaatcttgacttttcgaattccttattatgttggtccattggcgcgtggcaatagtcgttttgcatggatgactcggaagtctgaagaaacaattaccccatggaattttgaagaagttgtcgataaaggtgcttcagctcaatcatttattgaacgcatgacaaactttgataaaaatcttccaaatgaaaaagtactaccaaaacatagtttgctttatgagtattttacggtttataacgaattgacaaaggtcaaatatgttactgagggaatgcgaaaaccagcatttctttcaggtgaacagaagaaagccattgttgatttactcttcaaaacaaatcgaaaagtaaccgttaagcaattaaaagaagattatttcaaaaaaatagaatgttttgatagtgttgaaatttcaggagttgaagatagatttaatgcttcattaggcgcctaccatgatttgctaaaaattattaaagataaagattttttggataatgaagaaaatgaagatatcttagaggatattgttttaacattgaccttatttgaagatagggggatgattgaggaaagacttaaaacatatgctcacctctttgatgataaggtgatgaaacagcttaaacgtcgccgttatactggttggggacgtttgtctcgaaaattgattaatggtattagggataagcaatctggcaaaacaatattagattttttgaaatcagatggttttgccaatcgcaattttatgcagctgatccatgatgatagtttgacatttaaagaagatattcaaaaagcacaggtgtctggacaaggccatagtttacatgaacagattgctaacttagctggcagtcctgctattaaaaaaggtattttacagactgtaaaaattgttgatgaactggtcaaagtaatggggcataagccagaaaatatcgttattgaaatggcacgtgaaaatcagacaactcaaaagggccagaaaaattcgcgagagcgtatgaaacgaatcgaagaaggtatcaaagaattaggaagtcagattcttaaagagcatcctgttgaaaatactcaattgcaaaatgaaaagctctatctctattatctacaaaatggaagagacatgtatgtggaccaagaattagatattaatcgtttaagtgattatgatgtcgatcacattgttccacaaagtttcattaaagacgattcaatagacaataaggtactaacgcgttctgataaaaatcgtggtaaatcggataacgttccaagtgaagaagtagtcaaaaagatgaaaaactattggagacaacttctaaacgccaagttaatcactcaacgtaagtttgataatttaacgaaagctgaacgtggaggtttgagtgaacttgataaagctggttttatcaaacgccaattggttgaaactcgccaaatcactaagcatgtggcacaaattttggatagtcgcatgaatactaaatacgatgaaaatgataaacttattcgagaggttaaagtgattaccttaaaatctaaattagtttctgacttccgaaaagatttccaattctataaagtacgtgagattaacaattaccatcatgcccatgatgcgtatctaaatgccgtcgttggaactgctttgattaagaaatatccaaaacttgaatcggagtttgtctatggtgattataaagtttatgatgttcgtaaaatgattgctaagtctgagcaagaaataggcaaagcaaccgcaaaatatttcttttactctaatatcatgaacttcttcaaaacagaaattacacttgcaaatggagagattcgcaaacgccctctaatcgaaactaatggggaaactggagaaattgtctgggataaagggcgagattttgccacagtgcgcaaagtattgtccatgccccaagtcaatattgtcaagaaaacagaagtacagacaggcggattctccaaggagtcaattttaccaaaaagaaattcggacaagcttattgctcgtaaaaaagactgggatccaaaaaaatatggtggttttgatagtccaacggtagcttattcagtcctagtggttgctaaggtggaaaaagggaaatcgaagaagttaaaatccgttaaagagttactagggatcacaattatggaaagaagttcctttgaaaaaaatccgattgactttttagaagctaaaggatataaggaagttaaaaaagacttaatcattaaactacctaaatatagtctttttgagttagaaaacggtcgtaaacggatgctggctagtgccggagaattacaaaaaggaaatgagctggctctgccaagcaaatatgtgaattttttatatttagctagtcattatgaaaagttgaagggtagtccagaagataacgaacaaaaacaattgtttgtggagcagcataagcattatttagatgagattattgagcaaatcagtgaattttctaagcgtgttattttagcagatgccaatttagataaagttcttagtgcatataacaaacatagagacaaaccaatacgtgaacaagcagaaaatattattcatttatttacgttgacgaatcttggagctcccgctgcttttaaatattttgatacaacaattgatcgtaaacgatatacgtctacaaaagaagttttagatgccactcttatccatcaatccatcactggtctttatgaaacacgcattgatttgagtcagctaggaggtgactga

SEQ ID NO: 199 - protein, 1367 aa, Streptococcus pyogenes
  REGION 1..1367: note = MISC_FEATURE - spCas9 polypeptide sequence
MDKKYSIGLDIGTNSVGWAVITDDYKVPSKKFKVLGNTDRHSIKKNLIGALLFGSGETAEATRLKRTARRRYTRRKNRICYLQEIFSNEMAKVDDSFFHRLEESFLVEEDKKHERHPIFGNIVDEVAYHEKYPTIYHLRKKLADSTDKADLRLIYLALAHMIKFRGHFLIEGDLNPDNSDVDKLFIQLVQIYNQLFEENPINASRVDAKAILSARLSKSRRLENLIAQLPGEKRNGLFGNLIALSLGLTPNFKSNFDLAEDAKLQLSKDTYDDDLDNLLAQIGDQYADLFLAAKNLSDAILLSDILRVNSEITKAPLSASMIKRYDEHHQDLTLLKALVRQQLPEKYKEIFFDQSKNGYAGYIDGGASQEEFYKFIKPILEKMDGTEELLVKLNREDLLRKQRTFDNGSIPHQIHLGELHAILRRQEDFYPFLKDNREKIEKILTFRIPYYVGPLARGNSRFAWMTRKSEETITPWNFEEVVDKGASAQSFIERMTNFDKNLPNEKVLPKHSLLYEYFTVYNELTKVKYVTEGMRKPAFLSGEQKKAIVDLLFKTNRKVTVKQLKEDYFKKIECFDSVEISGVEDRFNASLGAYHDLLKIIKDKDFLDNEENEDILEDIVLTLTLFEDRGMIEERLKTYAHLFDDKVMKQLKRRRYTGWGRLSRKLINGIRDKQSGKTILDFLKSDGFANRNFMQLIHDDSLTFKEDIQKAQVSGQGHSLHEQIANLAGSPAIKKGILQTVKIVDELVKVMGHKPENIVIEMARENQTTQKGQKNSRERMKRIEEGIKELGSQILKEHPVENTQLQNEKLYLYYLQNGRDMYVDQELDINRLSDYDVDHIVPQSFIKDDSIDNKVLTRSDKNRGKSDNVPSEEVVKKMKNYWRQLLNAKLITQRKFDNLTKAERGGLSELDKAGFIKRQLVETRQITKHVAQILDSRMNTKYDENDKLIREVKVITLKSKLVSDFRKDFQFYKVREINNYHHAHDAYLNAVVGTALIKKYPKLESEFVYGDYKVYDVRKMIAKSEQEIGKATAKYFFYSNIMNFFKTEITLANGEIRKRPLIETNGETGEIVWDKGRDFATVRKVLSMPQVNIVKKTEVQTGGFSKESILPKRNSDKLIARKKDWDPKKYGGFDSPTVAYSVLVVAKVEKGKSKKLKSVKELLGITIMERSSFEKNPIDFLEAKGYKEVKKDLIIKLPKYSLFELENGRKRMLASAGELQKGNELALPSKYVNFLYLASHYEKLKGSPEDNEQKQLFVEQHKHYLDEIIEQISEFSKRVILADANLDKVLSAYNKHRDKPIREQAENIIHLFTLTNLGAPAAFKYFDTTIDRKRYTSTKEVLDATLIHQSITGLYETRIDLSQLGGD

SEQ ID NO: 200 - DNA, 4212 bp, synthetic construct
  misc_feature 1..4212: note = wild-type Cas9 polynucleotide sequence
  misc_feature 5..58: note = RuvC domain
  misc_feature 718..764: note = RuvC domain
  misc_feature 772..901: note = HNH domain
  misc_feature 906..1101: note = RuvC domain
  source 1..4212: mol_type = other DNA
atggataaaaagtattctattggtttagacatcggcactaattccgttggatgggctgtcataaccgatgaatacaaagtaccttcaaagaaatttaaggtgttggggaacacagaccgtcattcgattaaaaagaatcttatcggtgccctcctattcgatagtggcgaaacggcagaggcgactcgcctgaaacgaaccgctcggagaaggtatacacgtcgcaagaaccgaatatgttacttacaagaaatttttagcaatgagatggccaaagttgacgattctttctttcaccgtttggaagagtccttccttgtcgaagaggacaagaaacatgaacggcaccccatctttggaaacatagtagatgaggtggcatatcatgaaaagtacccaacgatttatcacctcagaaaaaagctagttgactcaactgataaagcggacctgaggttaatctacttggctcttgcccatatgataaagttccgtgggcactttctcattgagggtgatctaaatccggacaactcggatgtcgacaaactgttcatccagttagtacaaacctataatcagttgtttgaagagaaccctataaatgcaagtggcgtggatgcgaaggctattcttagcgcccgcctctctaaatcccgacggctagaaaacctgatcgcacaattacccggagagaagaaaaatgggttgttcggtaaccttatagcgctctcactaggcctgacaccaaattttaagtcgaacttcgacttagctgaagatgccaaattgcagcttagtaaggacacgtacgatgacgatctcgacaatctactggcacaaattggagatcagtatgcggacttatttttggctgccaaaaaccttagcgatgcaatcctcctatctgacatactgagagttaatactgagattaccaaggcgccgttatccgcttcaatgatcaaaaggtacgatgaacatcaccaagacttgacacttctcaaggccctagtccgtcagcaactgcctgagaaatataaggaaatattctttgatcagtcgaaaaacgggtacgcaggttatattgacggcggagcgagtcaagaggaattctacaagtttatcaaacccatattagagaagatggatgggacggaagagttgcttgtaaaactcaatcgcgaagatctactgcgaaagcagcggactttcgacaacggtagcattccacatcaaatccacttaggcgaattgcatgctatacttagaaggcaggaggatttttatccgttcctcaaagacaatcgtgaaaagattgagaaaatcctaacctttcgcataccttactatgtgggacccctggcccgagggaactctcggttcgcatggatgacaagaaagtccgaagaaacgattactccatggaattttgaggaagttgtcgataaaggtgcgtcagctcaatcgttcatcgagaggatgaccaactttgacaagaatttaccgaacgaaaaagtattgcctaagcacagtttactttacgagtatttcacagtgtacaatgaactcacgaaagttaagtatgtcactgagggcatgcgtaaacccgcctttctaagcggagaacagaagaaagcaatagtagatctgttattcaagaccaaccgcaaagtgacagttaagcaattgaaagaggactactttaagaaaattgaatgcttcgattctgtcgagatctccggggtagaagatcgatttaatgcgtcacttggtacgtatcatgacctcctaaagataattaaagataaggacttcctggataacgaagagaatgaagatatcttagaagatatagtgttgactcttaccctctttgaagatcgggaaatgattgaggaaagactaaaaacatacgctcacctgttcgacgataaggttatgaaacagttaaagaggcgtcgctatacgggctggggacgattgtcgcggaaacttatcaacgggataagagacaagcaaagtggtaaaactattctcgattttctaaagagcgacggcttcgccaataggaactttatgcagctgatccatgatgactctttaaccttcaaagaggatatacaaaaggcacaggtttccggacaaggggactcattgcacgaacatattgcgaatcttgctggttcgccagccatcaaaaagggcatactccagacagtcaaagtagtggatgagctagttaaggtcatgggacgtcacaaaccggaaaacattgtaatcgagatggcacgcgaaaatcaaacgactcagaaggggcaaaaaaacagtcgagagcggatgaagagaatagaagagggtattaaagaactgggcagccagatcttaaaggagcatcctgtggaaaatacccaattgcagaacgagaaactttacctctattacctacaaaatggaagggacatgtatgttgatcaggaactggacataaaccgtttatctgattacgacgtcgatcacattgtaccccaatcctttttgaaggacgattcaatcgacaataaagtgcttacacgctcggataagaaccgagggaaaagtgacaatgttccaagcgaggaagtcgtaaagaaaatgaagaactattggcggcagctcctaaatgcgaaactgataacgcaaagaaagttcgataacttaactaaagctgagaggggtggcttgtctgaacttgacaaggccggatttattaaacgtcagctcgtggaaacccgccaaatcacaaagcatgttgcacagatactagattcccgaatgaatacgaaatacgacgagaacgataagctgattcgggaagtcaaagtaatcactttaaagtcaaaattggtgtcggacttcagaaaggattttcaattctataaagttagggagataaataactaccaccatgcgcacgacgcttatcttaatgccgtcgtagggaccgcactcattaagaaatacccgaagctagaaagtgagtttgtgtatggtgattacaaagtttatgacgtccgtaagatgatcgcgaaaagcgaacaggagataggcaaggctacagccaaatacttcttttattctaacattatgaatttctttaagacggaaatcactctggcaaacggagagatacgcaaacgacctttaattgaaaccaatggggagacaggtgaaatcgtatgggataagggccgggacttcgcgacggtgagaaaagttttgtccatgccccaagtcaacatagtaaagaaaactgaggtgcagaccggagggttttcaaaggaatcgattcttccaaaaaggaatagtgataagctcatcgctcgtaaaaaggactgggacccgaaaaagtacggtggcttcgatagccctacagttgcctattctgtcctagtagtggcaaaagttgagaagggaaaatccaagaaactgaagtcagtcaaagaattattggggataacgattatggagcgctcgtcttttgaaaagaaccccatcgacttccttgaggcgaaaggttacaaggaagtaaaaaaggatctcataattaaactaccaaagtatagtctgtttgagttagaaaatggccgaaaacggatgttggctagcgccggagagcttcaaaaggggaacgaactcgcactaccgtctaaatacgtgaatttcctgtatttagcgtcccattacgagaagttgaaaggttcacctgaagataacgaacagaagcaactttttgttgagcagcacaaacattatctcgacgaaatcatagagcaaatttcggaattcagtaagagagtcatcctagctgatgccaatctggacaaagtattaagcgcatacaacaagcacagggataaacccatacgtgagcaggcggaaaatattatccatttgtttactcttaccaacctcggcgctccagccgcattcaagtattttgacacaacgatagatcgcaaacgatacacttctaccaaggaggtgctagacgcgacactgattcaccaatccatcacgggattatatgaaactcggatagatttgtcacagcttgggggtgacggatcccccaagaagaagaggaaagtctcgagcgactacaaagaccatgacggtgattataaagatcatgacatcgattacaaggatgacgatgacaaggctgcagga

SEQ ID NO: 201 - protein, 1368 aa, synthetic construct
  REGION 1..1368: note = exemplary catalytically active Cas9 nickase (nCas9) polypeptide sequence
MDKKYSIGLAIGTNSVGWAVITDEYKVPSKKFKVLGNTDRHSIKKNLIGALLFDSGETAEATRLKRTARRRYTRRKNRICYLQEIFSNEMAKVDDSFFHRLEESFLVEEDKKHERHPIFGNIVDEVAYHEKYPTIYHLRKKLVDSTDKADLRLIYLALAHMIKFRGHFLIEGDLNPDNSDVDKLFIQLVQTYNQLFEENPINASGVDAKAILSARLSKSRRLENLIAQLPGEKKNGLFGNLIALSLGLTPNFKSNFDLAEDAKLQLSKDTYDDDLDNLLAQIGDQYADLFLAAKNLSDAILLSDILRVNTEITKAPLSASMIKRYDEHHQDLTLLKALVRQQLPEKYKEIFFDQSKNGYAGYIDGGASQEEFYKFIKPILEKMDGTEELLVKLNREDLLRKQRTFDNGSIPHQIHLGELHAILRRQEDFYPFLKDNREKIEKILTFRIPYYVGPLARGNSRFAWMTRKSEETITPWNFEEVVDKGASAQSFIERMTNFDKNLPNEKVLPKHSLLYEYFTVYNELTKVKYVTEGMRKPAFLSGEQKKAIVDLLFKTNRKVTVKQLKEDYFKKIECFDSVEISGVEDRFNASLGTYHDLLKIIKDKDFLDNEENEDILEDIVLTLTLFEDREMIEERLKTYAHLFDDKVMKQLKRRRYTGWGRLSRKLINGIRDKQSGKTILDFLKSDGFANRNFMQLIHDDSLTFKEDIQKAQVSGQGDSLHEHIANLAGSPAIKKGILQTVKVVDELVKVMGRHKPENIVIEMARENQTTQKGQKNSRERMKRIEEGIKELGSQILKEHPVENTQLQNEKLYLYYLQNGRDMYVDQELDINRLSDYDVDHIVPQSFLKDDSIDNKVLTRSDKNRGKSDNVPSEEVVKKMKNYWRQLLNAKLITQRKFDNLTKAERGGLSELDKAGFIKRQLVETRQITKHVAQILDSRMNTKYDENDKLIREVKVITLKSKLVSDFRKDFQFYKVREINNYHHAHDAYLNAVVGTALIKKYPKLESEFVYGDYKVYDVRKMIAKSEQEIGKATAKYFFYSNIMNFFKTEITLANGEIRKRPLIETNGETGEIVWDKGRDFATVRKVLSMPQVNIVKKTEVQTGGFSKESILPKRNSDKLIARKKDWDPKKYGGFDSPTVAYSVLVVAKVEKGKSKKLKSVKELLGITIMERSSFEKNPIDFLEAKGYKEVKKDLIIKLPKYSLFELENGRKRMLASAGELQKGNELALPSKYVNFLYLASHYEKLKGSPEDNEQKQLFVEQHKHYLDEIIEQISEFSKRVILADANLDKVLSAYNKHRDKPIREQAENIIHLFTLTNLGAPAAFKYFDTTIDRKRYTSTKEVLDATLIHQSITGLYETRIDLSQLGGD

SEQ ID NO: 202 - DNA, 4107 bp, Streptococcus pyogenes
  misc_feature 1..4107: note = Cas9 from Streptococcus pyogenes (NCBI Ref. Seq.: NC_002737.2)polynucleotide sequence
  source 1..4107: mol_type = genomic DNA
atggataagaaatactcaataggcttagatatcggcacaaatagcgtcggatgggcggtgatcactgatgaatataaggttccgtctaaaaagttcaaggttctgggaaatacagaccgccacagtatcaaaaaaaatcttataggggctcttttatttgacagtggagagacagcggaagcgactcgtctcaaacggacagctcgtagaaggtatacacgtcggaagaatcgtatttgttatctacaggagattttttcaaatgagatggcgaaagtagatgatagtttctttcatcgacttgaagagtcttttttggtggaagaagacaagaagcatgaacgtcatcctatttttggaaatatagtagatgaagttgcttatcatgagaaatatccaactatctatcatctgcgaaaaaaattggtagattctactgataaagcggatttgcgcttaatctatttggccttagcgcatatgattaagtttcgtggtcattttttgattgagggagatttaaatcctgataatagtgatgtggacaaactatttatccagttggtacaaacctacaatcaattatttgaagaaaaccctattaacgcaagtggagtagatgctaaagcgattctttctgcacgattgagtaaatcaagacgattagaaaatctcattgctcagctccccggtgagaagaaaaatggcttatttgggaatctcattgctttgtcattgggtttgacccctaattttaaatcaaattttgatttggcagaagatgctaaattacagctttcaaaagatacttacgatgatgatttagataatttattggcgcaaattggagatcaatatgctgatttgtttttggcagctaagaatttatcagatgctattttactttcagatatcctaagagtaaatactgaaataactaaggctcccctatcagcttcaatgattaaacgctacgatgaacatcatcaagacttgactcttttaaaagctttagttcgacaacaacttccagaaaagtataaagaaatcttttttgatcaatcaaaaaacggatatgcaggttatattgatgggggagctagccaagaagaattttataaatttatcaaaccaattttagaaaaaatggatggtactgaggaattattggtgaaactaaatcgtgaagatttgctgcgcaagcaacggacctttgacaacggctctattccccatcaaattcacttgggtgagctgcatgctattttgagaagacaagaagacttttatccatttttaaaagacaatcgtgagaagattgaaaaaatcttgacttttcgaattccttattatgttggtccattggcgcgtggcaatagtcgttttgcatggatgactcggaagtctgaagaaacaattaccccatggaattttgaagaagttgtcgataaaggtgcttcagctcaatcatttattgaacgcatgacaaactttgataaaaatcttccaaatgaaaaagtactaccaaaacatagtttgctttatgagtattttacggtttataacgaattgacaaaggtcaaatatgttactgaaggaatgcgaaaaccagcatttctttcaggtgaacagaagaaagccattgttgatttactcttcaaaacaaatcgaaaagtaaccgttaagcaattaaaagaagattatttcaaaaaaatagaatgttttgatagtgttgaaatttcaggagttgaagatagatttaatgcttcattaggtacctaccatgatttgctaaaaattattaaagataaagattttttggataatgaagaaaatgaagatatcttagaggatattgttttaacattgaccttatttgaagatagggagatgattgaggaaagacttaaaacatatgctcacctctttgatgataaggtgatgaaacagcttaaacgtcgccgttatactggttggggacgtttgtctcgaaaattgattaatggtattagggataagcaatctggcaaaacaatattagattttttgaaatcagatggttttgccaatcgcaattttatgcagctgatccatgatgatagtttgacatttaaagaagacattcaaaaagcacaagtgtctggacaaggcgatagtttacatgaacatattgcaaatttagctggtagccctgctattaaaaaaggtattttacagactgtaaaagttgttgatgaattggtcaaagtaatggggcggcataagccagaaaatatcgttattgaaatggcacgtgaaaatcagacaactcaaaagggccagaaaaattcgcgagagcgtatgaaacgaatcgaagaaggtatcaaagaattaggaagtcagattcttaaagagcatcctgttgaaaatactcaattgcaaaatgaaaagctctatctctattatctccaaaatggaagagacatgtatgtggaccaagaattagatattaatcgtttaagtgattatgatgtcgatcacattgttccacaaagtttccttaaagacgattcaatagacaataaggtcttaacgcgttctgataaaaatcgtggtaaatcggataacgttccaagtgaagaagtagtcaaaaagatgaaaaactattggagacaacttctaaacgccaagttaatcactcaacgtaagtttgataatttaacgaaagctgaacgtggaggtttgagtgaacttgataaagctggttttatcaaacgccaattggttgaaactcgccaaatcactaagcatgtggcacaaattttggatagtcgcatgaatactaaatacgatgaaaatgataaacttattcgagaggttaaagtgattaccttaaaatctaaattagtttctgacttccgaaaagatttccaattctataaagtacgtgagattaacaattaccatcatgcccatgatgcgtatctaaatgccgtcgttggaactgctttgattaagaaatatccaaaacttgaatcggagtttgtctatggtgattataaagtttatgatgttcgtaaaatgattgctaagtctgagcaagaaataggcaaagcaaccgcaaaatatttcttttactctaatatcatgaacttcttcaaaacagaaattacacttgcaaatggagagattcgcaaacgccctctaatcgaaactaatggggaaactggagaaattgtctgggataaagggcgagattttgccacagtgcgcaaagtattgtccatgccccaagtcaatattgtcaagaaaacagaagtacagacaggcggattctccaaggagtcaattttaccaaaaagaaattcggacaagcttattgctcgtaaaaaagactgggatccaaaaaaatatggtggttttgatagtccaacggtagcttattcagtcctagtggttgctaaggtggaaaaagggaaatcgaagaagttaaaatccgttaaagagttactagggatcacaattatggaaagaagttcctttgaaaaaaatccgattgactttttagaagctaaaggatataaggaagttaaaaaagacttaatcattaaactacctaaatatagtctttttgagttagaaaacggtcgtaaacggatgctggctagtgccggagaattacaaaaaggaaatgagctggctctgccaagcaaatatgtgaattttttatatttagctagtcattatgaaaagttgaagggtagtccagaagataacgaacaaaaacaattgtttgtggagcagcataagcattatttagatgagattattgagcaaatcagtgaattttctaagcgtgttattttagcagatgccaatttagataaagttcttagtgcatataacaaacatagagacaaaccaatacgtgaacaagcagaaaatattattcatttatttacgttgacgaatcttggagctcccgctgcttttaaatattttgatacaacaattgatcgtaaacgatatacgtctacaaaagaagttttagatgccactcttatccatcaatccatcactggtctttatgaaacacgcattgatttgagtcagctaggaggtgactga

SEQ ID NO: 203 - protein, 1368 aa, synthetic construct
  REGION 1..1368: note = catalytically inactive Cas9 (dCas9)polypeptide sequence
  REGION 5..58: note = MISC_FEATURE - RuvC domain
  REGION 718..764: note = MISC_FEATURE - RuvC domain
  REGION 773..902: note = MISC_FEATURE - HNH domain
  REGION 907..1102: note = MISC_FEATURE - RuvC domain
MDKKYSIGLAIGTNSVGWAVITDEYKVPSKKFKVLGNTDRHSIKKNLIGALLFDSGETAEATRLKRTARRRYTRRKNRICYLQEIFSNEMAKVDDSFFHRLEESFLVEEDKKHERHPIFGNIVDEVAYHEKYPTIYHLRKKLVDSTDKADLRLIYLALAHMIKFRGHFLIEGDLNPDNSDVDKLFIQLVQTYNQLFEENPINASGVDAKAILSARLSKSRRLENLIAQLPGEKKNGLFGNLIALSLGLTPNFKSNFDLAEDAKLQLSKDTYDDDLDNLLAQIGDQYADLFLAAKNLSDAILLSDILRVNTEITKAPLSASMIKRYDEHHQDLTLLKALVRQQLPEKYKEIFFDQSKNGYAGYIDGGASQEEFYKFIKPILEKMDGTEELLVKLNREDLLRKQRTFDNGSIPHQIHLGELHAILRRQEDFYPFLKDNREKIEKILTFRIPYYVGPLARGNSRFAWMTRKSEETITPWNFEEVVDKGASAQSFIERMTNFDKNLPNEKVLPKHSLLYEYFTVYNELTKVKYVTEGMRKPAFLSGEQKKAIVDLLFKTNRKVTVKQLKEDYFKKIECFDSVEISGVEDRFNASLGTYHDLLKIIKDKDFLDNEENEDILEDIVLTLTLFEDREMIEERLKTYAHLFDDKVMKQLKRRRYTGWGRLSRKLINGIRDKQSGKTILDFLKSDGFANRNFMQLIHDDSLTFKEDIQKAQVSGQGDSLHEHIANLAGSPAIKKGILQTVKVVDELVKVMGRHKPENIVIEMARENQTTQKGQKNSRERMKRIEEGIKELGSQILKEHPVENTQLQNEKLYLYYLQNGRDMYVDQELDINRLSDYDVDAIVPQSFLKDDSIDNKVLTRSDKNRGKSDNVPSEEVVKKMKNYWRQLLNAKLITQRKFDNLTKAERGGLSELDKAGFIKRQLVETRQITKHVAQILDSRMNTKYDENDKLIREVKVITLKSKLVSDFRKDFQFYKVREINNYHHAHDAYLNAVVGTALIKKYPKLESEFVYGDYKVYDVRKMIAKSEQEIGKATAKYFFYSNIMNFFKTEITLANGEIRKRPLIETNGETGEIVWDKGRDFATVRKVLSMPQVNIVKKTEVQTGGFSKESILPKRNSDKLIARKKDWDPKKYGGFDSPTVAYSVLVVAKVEKGKSKKLKSVKELLGITIMERSSFEKNPIDFLEAKGYKEVKKDLIIKLPKYSLFELENGRKRMLASAGELQKGNELALPSKYVNFLYLASHYEKLKGSPEDNEQKQLFVEQHKHYLDEIIEQISEFSKRVILADANLDKVLSAYNKHRDKPIREQAENIIHLFTLTNLGAPAAFKYFDTTIDRKRYTSTKEVLDATLIHQSITGLYETRIDLSQLGGD

SEQ ID NO: 204 - protein, 345 aa, Sulfolobus islandicus
  REGION 1..345: note = MISC_FEATURE - tr|F0NN87|F0NN87_SULIHCRISPR-associatedCasx protein OS =Sulfolobus islandicus (strain HVE10/4) GN = SiH_0402 PE=4; SV = 1);CasX polypeptide sequence
MEVPLYNIFGDNYIIQVATEAENSTIYNNKVEIDDEELRNVLNLAYKIAKNNEDAAAERRGKAKKKKGEEGETTTSNIILPLSGNDKNPWTETLKCYNFPTTVALSEVFKNFSQVKECEEVSAPSFVKPEFYEFGRSPGMVERTRRVKLEVEPHYLIIAAAGWVLTRLGKAKVSEGDYVGVNVFTPTRGILYSLIQNVNGIVPGIKPETAFGLWIARKVVSSVTNPNVSVVRIYTISDAVGQNPTTINGGFSIDLTKLLEKRYLLSERLEAIARNALSISSNMRERYIVLANYIYEYLTGSKRLEDLLYFANRDLIMNLNSDDGKVRDLKLISAYVNGELIRGEG

SEQ ID NO: 205 - protein, 345 aa, Sulfolobus islandicus
  REGION 1..345: note = MISC_FEATURE - tr|F0NH53|F0NH53_SULIR CRISPR associated protein, Casx OS =Sulfolobus islandicus (strain REY15A) GN=SiRe_0771 PE=4 SV=1);CasX polypeptide sequence
MEVPLYNIFGDNYIIQVATEAENSTIYNNKVEIDDEELRNVLNLAYKIAKNNEDAAAERRGKAKKKKGEEGETTTSNIILPLSGNDKNPWTETLKCYNFPTTVALSEVFKNFSQVKECEEVSAPSFVKPEFYKFGRSPGMVERTRRVKLEVEPHYLIMAAAGWVLTRLGKAKVSEGDYVGVNVFTPTRGILYSLIQNVNGIVPGIKPETAFGLWIARKVVSSVTNPNVSVVSIYTISDAVGQNPTTINGGFSIDLTKLLEKRDLLSERLEAIARNALSISSNMRERYIVLANYIYEYLTGSKRLEDLLYFANRDLIMNLNSDDGKVRDLKLISAYVNGELIRGEG

SEQ ID NO: 206 - protein, 987 aa, unidentified
  REGION 1..987: note = MISC_FEATURE - CasX polypeptide sequence
MEKRINKIRKKLSADNATKPVSRSGPMKTLLVRVMTDDLKKRLEKRRKKPEVMPQVISNNAANNLRMLLDDYTKMKEAILQVYWQEFKDDHVGLMCKFAQPASKKIDQNKLKPEMDEKGNLTTAGFACSQCGQPLFVYKLEQVSEKGKAYTNYFGRCNVAEHEKLILLAQLKPVKDSDEAVTYSLGKFGQRALDFYSIHVTKESTHPVKPLAQIAGNRYASGPVGKALSDACMGTIASFLSKYQDIIIEHQKVVKGNQKRLESLRELAGKENLEYPSVTLPPQPHTKEGVDFAYNEVIARVRMWVNLNLWQKLKLSRDDAKPLLRLKGFPSFPVVERRENEVDWWNTINEVKKLIDAKRDMGRVFWSGVTAEKRNTILEGYNYLPNENDHKKREGSLENPKKPAKRQFGDLLLYLEKKYAGDWGKVFDEAWERIDKKIAGLTSHIEREEARNAEDAQSKAVLTDWLRAKASFVLERLKEMDEKEFYACEIQLQKWYGDLRGNPFAVEAENRVVDISGFSIGSDGHSIQYRNLLAWKYLENGKREFYLLMNYGKKGRIRFTDGTDIKKSGKWQGLLYGGGKAKVIDLTFDPDDEQLIILPLAFGTRQGREFIWNDLLSLETGLIKLANGRVIEKTIYNKKIGRDEPALFVALTFERREVVDPSNIKPVNLIGVARGENIPAVIALTDPEGCPLPEFKDSSGGPTDILRIGEGYKEKQRAIQAAKEVEQRRAGGYSRKFASKSRNLADDMVRNSARDLFYHAVTHDAVLVFANLSRGFGRQGKRTFMTERQYTKMEDWLTAKLAYEGLTSKTYLSKTLAQYTSKTCSNCGFTITYADMDVMLVRLKKTSDGWATTLNNKELKAEYQITYYNRYKRQTVEKELSAELDRLSEESGNNDISKWTKGRRDEALFLLKKRFSHRPVQEQFVCLDCGHEVHAAEQAALNIARSWLFLNSNSTEFKSYKSGKQPFVGAWQAFYKRRLKEVWKPNA

SEQ ID NO: 207 - protein, 1210 aa, unidentified
  REGION 1..1210: note = MISC_FEATURE - APG80656.1 CRISPR-associated protein CasY [uncultured Parcubacteria group bacterium]; CasY polypeptide sequence
MSKRHPRISGVKGYRLHAQRLEYTGKSGAMRTIKYPLYSSPSGGRTVPREIVSAINDDYVGLYGLSNFDDLYNAEKRNEEKVYSVLDFWYDCVQYGAVFSYTAPGLLKNVAEVRGGSYELTKTLKGSHLYDELQIDKVIKFLNKKEISRANGSLDKLKKDIIDCFKAEYRERHKDQCNKLADDIKNAKKDAGASLGERQKKLFRDFFGISEQSENDKPSFTNPLNLTCCLLPFDTVNNNRNRGEVLFNKLKEYAQKLDKNEGSLEMWEYIGIGNSGTAFSNFLGEGFLGRLRENKITELKKAMMDITDAWRGQEQEEELEKRLRILAALTIKLREPKFDNHWGGYRSDINGKLSSWLQNYINQTVKIKEDLKGHKKDLKKAKEMINRFGESDTKEEAVVSSLLESIEKIVPDDSADDEKPDIPAIAIYRRFLSDGRLTLNRFVQREDVQEALIKERLEAEKKKKPKKRKKKSDAEDEKETIDFKELFPHLAKPLKLVPNFYGDSKRELYKKYKNAAIYTDALWKAVEKIYKSAFSSSLKNSFFDTDFDKDFFIKRLQKIFSVYRRFNTDKWKPIVKNSFAPYCDIVSLAENEVLYKPKQSRSRKSAAIDKNRVRLPSTENIAKAGIALARELSVAGFDWKDLLKKEEHEEYIDLIELHKTALALLLAVTETQLDISALDFVENGTVKDFMKTRDGNLVLEGRFLEMFSQSIVFSELRGLAGLMSRKEFITRSAIQTMNGKQAELLYIPHEFQSAKITTPKEMSRAFLDLAPAEFATSLEPESLSEKSLLKLKQMRYYPHYFGYELTRTGQGIDGGVAENALRLEKSPVKKREIKCKQYKTLGRGQNKIVLYVRSSYYQTQFLEWFLHRPKNVQTDVAVSGSFLIDEKKVKTRWNYDALTVALEPVSGSERVFVSQPFTIFPEKSAEEEGQRYLGIDIGEYGIAYTALEITGDSAKILDQNFISDPQLKTLREEVKGLKLDQRRGTFAMPSTKIARIRESLVHSLRNRIHHLALKHKAKIVYELEVSRFEEGKQKIKKVYATLKKADVYSEIDADKNLQTTVWGKLAVASEISASYTSQFCGACKKLWRAEMQVDETITTQELIGTVRVIKGGTLIDAIKDFMRPPIFDENDTPFPKYRDFCDKHHISKKMRGNSCLFICPFCRANADADIQASQTIALLRYVKEEKKVEDYFERFRKLKNIKVLGQMKKI

SEQ ID NO: 208 - protein, 1082 aa, Neisseria meningitidis
  REGION 1..1082: note = MISC_FEATURE - NCBI Reference: WP_002235162.1; type II CRISPR RNA-guided endonuclease Cas9; Nme1Cas9 polypeptide sequence
MAAFKPNPINYILGLDIGIASVGWAMVEIDEDENPICLIDLGVRVFERAEVPKTGDSLAMARRLARSVRRLTRRRAHRLLRARRLLKREGVLQAADFDENGLIKSLPNTPWQLRAAALDRKLTPLEWSAVLLHLIKHRGYLSQRKNEGETADKELGALLKGVADNAHALQTGDFRTPAELALNKFEKESGHIRNQRGDYSHTFSRKDLQAELILLFEKQKEFGNPHVSGGLKEGIETLLMTQRPALSGDAVQKMLGHCTFEPAEPKAAKNTYTAERFIWLTKLNNLRILEQGSERPLTDTERATLMDEPYRKSKLTYAQARKLLGLEDTAFFKGLRYGKDNAEASTLMEMKAYHAISRALEKEGLKDKKSPLNLSPELQDEIGTAFSLFKTDEDITGRLKDRIQPEILEALLKHISFDKFVQISLKALRRIVPLMEQGKRYDEACAEIYGDHYGKKNTEEKIYLPPIPADEIRNPVVLRALSQARKVINGVVRRYGSPARIHIETAREVGKSFKDRKEIEKRQEENRKDREKAAAKFREYFPNFVGEPKSKDILKLRLYEQQHGKCLYSGKEINLGRLNEKGYVEIDHALPFSRTWDDSFNNKVLVLGSENQNKGNQTPYEYFNGKDNSREWQEFKARVETSRFPRSKKQRILLQKFDEDGFKERNLNDTRYVNRFLCQFVADRMRLTGKGKKRVFASNGQITNLLRGFWGLRKVRAENDRHHALDAVVVACSTVAMQQKITRFVRYKEMNAFDGKTIDKETGEVLHQKTHFPQPWEFFAQEVMIRVFGKPDGKPEFEEADTPEKLRTLLAEKLSSRPEAVHEYVTPLFVSRAPNRKMSGQGHMETVKSAKRLDEGVSVLRVPLTQLKLKDLEKMVNREREPKLYEALKARLEAHKDDPAKAFAEPFYKYDKAGNRTQQVKAVRVEQVQKTGVWVRNHNGIADNATMVRVDVFEKGDKYYLVPIYSWQVAKGILPDRAVVQGKDEEDWQLIDDSFNFKFSLHPNDLVEVITKKARMFGYFASCHRGTGNINIRIHDLDHKIGKNGILEGIGVKTALSFQKYQIDELGKEIRPCRLKKRPPVR

SEQ ID NO: 209 - protein, 1082 aa, Neisseria meningitidis
  REGION 1..1082: note = MISC_FEATURE - NCBI Reference: WP_002230835; type II CRISPR RNA-guided endonuclease Cas9; Nme2Cas9 polypeptide sequence
MAAFKPNPINYILGLDIGIASVGWAMVEIDEEENPIRLIDLGVRVFERAEVPKTGDSLAMARRLARSVRRLTRRRAHRLLRARRLLKREGVLQAADFDENGLIKSLPNTPWQLRAAALDRKLTPLEWSAVLLHLIKHRGYLSQRKNEGETADKELGALLKGVANNAHALQTGDFRTPAELALNKFEKESGHIRNQRGDYSHTFSRKDLQAELILLFEKQKEFGNPHVSGGLKEGIETLLMTQRPALSGDAVQKMLGHCTFEPAEPKAAKNTYTAERFIWLTKLNNLRILEQGSERPLTDTERATLMDEPYRKSKLTYAQARKLLGLEDTAFFKGLRYGKDNAEASTLMEMKAYHAISRALEKEGLKDKKSPLNLSSELQDEIGTAFSLFKTDEDITGRLKDRVQPEILEALLKHISFDKFVQISLKALRRIVPLMEQGKRYDEACAEIYGDHYGKKNTEEKIYLPPIPADEIRNPVVLRALSQARKVINGVVRRYGSPARIHIETAREVGKSFKDRKEIEKRQEENRKDREKAAAKFREYFPNFVGEPKSKDILKLRLYEQQHGKCLYSGKEINLVRLNEKGYVEIDHALPFSRTWDDSFNNKVLVLGSENQNKGNQTPYEYFNGKDNSREWQEFKARVETSRFPRSKKQRILLQKFDEDGFKECNLNDTRYVNRFLCQFVADHILLTGKGKRRVFASNGQITNLLRGFWGLRKVRAENDRHHALDAVVVACSTVAMQQKITRFVRYKEMNAFDGKTIDKETGKVLHQKTHFPQPWEFFAQEVMIRVFGKPDGKPEFEEADTPEKLRTLLAEKLSSRPEAVHEYVTPLFVSRAPNRKMSGAHKDTLRSAKRFVKHNEKISVKRVWLTEIKLADLENMVNYKNGREIELYEALKARLEAYGGNAKQAFDPKDNPFYKKGGQLVKAVRVEKTQESGVLLNKKNAYTIADNGDMVRVDVFCKVDKKGKNQYFIVPIYAWQVAENILPDIDCKGYRIDDSYTFCFSLHKYDLIAFQKDEKSKVEFAYYINCDSSNGRFYLAWHDKGSKEQQFRISTQNLVLIQKYQVNELGKEIRPCRLKKRPPVR

SEQ ID NO: 210 - protein, 1300 aa, Francisella tularensis
  REGION 1..1300: note = MISC_FEATURE - wild type Cpf1 polypeptide sequence
  source 1..1300: note = subspecies novicida
MSIYQEFVNKYSLSKTLRFELIPQGKTLENIKARGLILDDEKRAKDYKKAKQIIDKYHQFFIEEILSSVCISEDLLQNYSDVYFKLKKSDDDNLQKDFKSAKDTIKKQISEYIKDSEKFKNLFNQNLIDAKKGQESDLILWLKQSKDNGIELFKANSDITDIDEALEIIKSFKGWTTYFKGFHENRKNVYSSNDIPTSIIYRIVDDNLPKFLENKAKYESLKDKAPEAINYEQIKKDLAEELTFDIDYKTSEVNQRVFSLDEVFEIANFNNYLNQSGITKFNTIIGGKFVNGENTKRKGINEYINLYSQQINDKTLKKYKMSVLFKQILSDTESKSFVIDKLEDDSDVVTTMQSFYEQIAAFKTVEEKSIKETLSLLFDDLKAQKLDLSKIYFKNDKSLTDLSQQVFDDYSVIGTAVLEYITQQIAPKNLDNPSKKEQELIAKKTEKAKYLSLETIKLALEEFNKHRDIDKQCRFEEILANFAAIPMIFDEIAQNKDNLAQISIKYQNQGKKDLLQASAEDDVKAIKDLLDQTNNLLHKLKIFHISQSEDKANILDKDEHFYLVFEECYFELANIVPLYNKIRNYITQKPYSDEKFKLNFENSTLANGWDKNKEPDNTAILFIKDDKYYLGVMNKKNNKIFDDKAIKENKGEGYKKIVYKLLPGANKMLPKVFFSAKSIKFYNPSEDILRIRNHSTHTKNGSPQKGYEKFEFNIEDCRKFIDFYKQSISKHPEWKDFGFRFSDTQRYNSIDEFYREVENQGYKLTFENISESYIDSVVNQGKLYLFQIYNKDFSAYSKGRPNLHTLYWKALFDERNLQDVVYKLNGEAELFYRKQSIPKKITHPAKEAIANKNKDNPKKESVFEYDLIKDKRFTEDKFFFHCPITINFKSSGANKFNDEINLLLKEKANDVHILSIDRGERHLAYYTLVDGKGNIIKQDTFNIIGNDRMKTNYHDKLAAIEKDRDSARKDWKKINNIKEMKEGYLSQVVHEIAKLVIEYNAIVVFEDLNFGFKRGRFKVEKQVYQKLEKMLIEKLNYLVFKDNEFDKTGGVLRAYQLTAPFETFKKMGKQTGIIYYVPAGFTSKICPVTGFVNQLYPKYESVSKSQEFFSKFDKICYNLDKGYFEFSFDYKNFGDKAAKGKWTIASFGSRLINFRNSDKNHNWDTREVYPTKELEKLLKDYSIEYGHGECIKAAICGESDKKFFAKLTSVLNTILQMRNSKTGTELDYLISPVADVNGNFFDSRQAPKNMPQDADANGAYHIGLKGLMLLGRIKNNQEGKKLNLVIKNEEYFEFVQNRNN

SEQ ID NO: 211 - protein, 1300 aa, Francisella tularensis
  REGION 1..1300: note = MISC_FEATURE - Cpf1 D917A polypeptide sequence
  source 1..1300: note = subspecies novicida
MSIYQEFVNKYSLSKTLRFELIPQGKTLENIKARGLILDDEKRAKDYKKAKQIIDKYHQFFIEEILSSVCISEDLLQNYSDVYFKLKKSDDDNLQKDFKSAKDTIKKQISEYIKDSEKFKNLFNQNLIDAKKGQESDLILWLKQSKDNGIELFKANSDITDIDEALEIIKSFKGWTTYFKGFHENRKNVYSSNDIPTSIIYRIVDDNLPKFLENKAKYESLKDKAPEAINYEQIKKDLAEELTFDIDYKTSEVNQRVFSLDEVFEIANFNNYLNQSGITKFNTIIGGKFVNGENTKRKGINEYINLYSQQINDKTLKKYKMSVLFKQILSDTESKSFVIDKLEDDSDVVTTMQSFYEQIAAFKTVEEKSIKETLSLLFDDLKAQKLDLSKIYFKNDKSLTDLSQQVFDDYSVIGTAVLEYITQQIAPKNLDNPSKKEQELIAKKTEKAKYLSLETIKLALEEFNKHRDIDKQCRFEEILANFAAIPMIFDEIAQNKDNLAQISIKYQNQGKKDLLQASAEDDVKAIKDLLDQTNNLLHKLKIFHISQSEDKANILDKDEHFYLVFEECYFELANIVPLYNKIRNYITQKPYSDEKFKLNFENSTLANGWDKNKEPDNTAILFIKDDKYYLGVMNKKNNKIFDDKAIKENKGEGYKKIVYKLLPGANKMLPKVFFSAKSIKFYNPSEDILRIRNHSTHTKNGSPQKGYEKFEFNIEDCRKFIDFYKQSISKHPEWKDFGFRFSDTQRYNSIDEFYREVENQGYKLTFENISESYIDSVVNQGKLYLFQIYNKDFSAYSKGRPNLHTLYWKALFDERNLQDVVYKLNGEAELFYRKQSIPKKITHPAKEAIANKNKDNPKKESVFEYDLIKDKRFTEDKFFFHCPITINFKSSGANKFNDEINLLLKEKANDVHILSIARGERHLAYYTLVDGKGNIIKQDTFNIIGNDRMKTNYHDKLAAIEKDRDSARKDWKKINNIKEMKEGYLSQVVHEIAKLVIEYNAIVVFEDLNFGFKRGRFKVEKQVYQKLEKMLIEKLNYLVFKDNEFDKTGGVLRAYQLTAPFETFKKMGKQTGIIYYVPAGFTSKICPVTGFVNQLYPKYESVSKSQEFFSKFDKICYNLDKGYFEFSFDYKNFGDKAAKGKWTIASFGSRLINFRNSDKNHNWDTREVYPTKELEKLLKDYSIEYGHGECIKAAICGESDKKFFAKLTSVLNTILQMRNSKTGTELDYLISPVADVNGNFFDSRQAPKNMPQDADANGAYHIGLKGLMLLGRIKNNQEGKKLNLVIKNEEYFEFVQNRNN

SEQ ID NO: 212 - protein, 1300 aa, Francisella tularensis
  REGION 1..1300: note = MISC_FEATURE - Cpf1 E1006A polypeptide sequence
  source 1..1300: note = subspecies novicida
MSIYQEFVNKYSLSKTLRFELIPQGKTLENIKARGLILDDEKRAKDYKKAKQIIDKYHQFFIEEILSSVCISEDLLQNYSDVYFKLKKSDDDNLQKDFKSAKDTIKKQISEYIKDSEKFKNLFNQNLIDAKKGQESDLILWLKQSKDNGIELFKANSDITDIDEALEIIKSFKGWTTYFKGFHENRKNVYSSNDIPTSIIYRIVDDNLPKFLENKAKYESLKDKAPEAINYEQIKKDLAEELTFDIDYKTSEVNQRVFSLDEVFEIANFNNYLNQSGITKFNTIIGGKFVNGENTKRKGINEYINLYSQQINDKTLKKYKMSVLFKQILSDTESKSFVIDKLEDDSDVVTTMQSFYEQIAAFKTVEEKSIKETLSLLFDDLKAQKLDLSKIYFKNDKSLTDLSQQVFDDYSVIGTAVLEYITQQIAPKNLDNPSKKEQELIAKKTEKAKYLSLETIKLALEEFNKHRDIDKQCRFEEILANFAAIPMIFDEIAQNKDNLAQISIKYQNQGKKDLLQASAEDDVKAIKDLLDQTNNLLHKLKIFHISQSEDKANILDKDEHFYLVFEECYFELANIVPLYNKIRNYITQKPYSDEKFKLNFENSTLANGWDKNKEPDNTAILFIKDDKYYLGVMNKKNNKIFDDKAIKENKGEGYKKIVYKLLPGANKMLPKVFFSAKSIKFYNPSEDILRIRNHSTHTKNGSPQKGYEKFEFNIEDCRKFIDFYKQSISKHPEWKDFGFRFSDTQRYNSIDEFYREVENQGYKLTFENISESYIDSVVNQGKLYLFQIYNKDFSAYSKGRPNLHTLYWKALFDERNLQDVVYKLNGEAELFYRKQSIPKKITHPAKEAIANKNKDNPKKESVFEYDLIKDKRFTEDKFFFHCPITINFKSSGANKFNDEINLLLKEKANDVHILSIDRGERHLAYYTLVDGKGNIIKQDTFNIIGNDRMKTNYHDKLAAIEKDRDSARKDWKKINNIKEMKEGYLSQVVHEIAKLVIEYNAIVVFADLNFGFKRGRFKVEKQVYQKLEKMLIEKLNYLVFKDNEFDKTGGVLRAYQLTAPFETFKKMGKQTGIIYYVPAGFTSKICPVTGFVNQLYPKYESVSKSQEFFSKFDKICYNLDKGYFEFSFDYKNFGDKAAKGKWTIASFGSRLINFRNSDKNHNWDTREVYPTKELEKLLKDYSIEYGHGECIKAAICGESDKKFFAKLTSVLNTILQMRNSKTGTELDYLISPVADVNGNFFDSRQAPKNMPQDADANGAYHIGLKGLMLLGRIKNNQEGKKLNLVIKNEEYFEFVQNRNN

SEQ ID NO: 213 - protein, 1300 aa, Francisella tularensis
  REGION 1..1300: note = MISC_FEATURE - Cpf1 D1255A polypeptide sequence
  source 1..1300: note = subspecies novicida
MSIYQEFVNKYSLSKTLRFELIPQGKTLENIKARGLILDDEKRAKDYKKAKQIIDKYHQFFIEEILSSVCISEDLLQNYSDVYFKLKKSDDDNLQKDFKSAKDTIKKQISEYIKDSEKFKNLFNQNLIDAKKGQESDLILWLKQSKDNGIELFKANSDITDIDEALEIIKSFKGWTTYFKGFHENRKNVYSSNDIPTSIIYRIVDDNLPKFLENKAKYESLKDKAPEAINYEQIKKDLAEELTFDIDYKTSEVNQRVFSLDEVFEIANFNNYLNQSGITKFNTIIGGKFVNGENTKRKGINEYINLYSQQINDKTLKKYKMSVLFKQILSDTESKSFVIDKLEDDSDVVTTMQSFYEQIAAFKTVEEKSIKETLSLLFDDLKAQKLDLSKIYFKNDKSLTDLSQQVFDDYSVIGTAVLEYITQQIAPKNLDNPSKKEQELIAKKTEKAKYLSLETIKLALEEFNKHRDIDKQCRFEEILANFAAIPMIFDEIAQNKDNLAQISIKYQNQGKKDLLQASAEDDVKAIKDLLDQTNNLLHKLKIFHISQSEDKANILDKDEHFYLVFEECYFELANIVPLYNKIRNYITQKPYSDEKFKLNFENSTLANGWDKNKEPDNTAILFIKDDKYYLGVMNKKNNKIFDDKAIKENKGEGYKKIVYKLLPGANKMLPKVFFSAKSIKFYNPSEDILRIRNHSTHTKNGSPQKGYEKFEFNIEDCRKFIDFYKQSISKHPEWKDFGFRFSDTQRYNSIDEFYREVENQGYKLTFENISESYIDSVVNQGKLYLFQIYNKDFSAYSKGRPNLHTLYWKALFDERNLQDVVYKLNGEAELFYRKQSIPKKITHPAKEAIANKNKDNPKKESVFEYDLIKDKRFTEDKFFFHCPITINFKSSGANKFNDEINLLLKEKANDVHILSIDRGERHLAYYTLVDGKGNIIKQDTFNIIGNDRMKTNYHDKLAAIEKDRDSARKDWKKINNIKEMKEGYLSQVVHEIAKLVIEYNAIVVFEDLNFGFKRGRFKVEKQVYQKLEKMLIEKLNYLVFKDNEFDKTGGVLRAYQLTAPFETFKKMGKQTGIIYYVPAGFTSKICPVTGFVNQLYPKYESVSKSQEFFSKFDKICYNLDKGYFEFSFDYKNFGDKAAKGKWTIASFGSRLINFRNSDKNHNWDTREVYPTKELEKLLKDYSIEYGHGECIKAAICGESDKKFFAKLTSVLNTILQMRNSKTGTELDYLISPVADVNGNFFDSRQAPKNMPQDAAANGAYHIGLKGLMLLGRIKNNQEGKKLNLVIKNEEYFEFVQNRNN

SEQ ID NO: 214 - protein, 1300 aa, Francisella tularensis
  REGION 1..1300: note = MISC_FEATURE - Cpf1 D917A/E1006A polypeptide sequence
  source 1..1300: note = subspecies novicida
MSIYQEFVNKYSLSKTLRFELIPQGKTLENIKARGLILDDEKRAKDYKKAKQIIDKYHQFFIEEILSSVCISEDLLQNYSDVYFKLKKSDDDNLQKDFKSAKDTIKKQISEYIKDSEKFKNLFNQNLIDAKKGQESDLILWLKQSKDNGIELFKANSDITDIDEALEIIKSFKGWTTYFKGFHENRKNVYSSNDIPTSIIYRIVDDNLPKFLENKAKYESLKDKAPEAINYEQIKKDLAEELTFDIDYKTSEVNQRVFSLDEVFEIANFNNYLNQSGITKFNTIIGGKFVNGENTKRKGINEYINLYSQQINDKTLKKYKMSVLFKQILSDTESKSFVIDKLEDDSDVVTTMQSFYEQIAAFKTVEEKSIKETLSLLFDDLKAQKLDLSKIYFKNDKSLTDLSQQVFDDYSVIGTAVLEYITQQIAPKNLDNPSKKEQELIAKKTEKAKYLSLETIKLALEEFNKHRDIDKQCRFEEILANFAAIPMIFDEIAQNKDNLAQISIKYQNQGKKDLLQASAEDDVKAIKDLLDQTNNLLHKLKIFHISQSEDKANILDKDEHFYLVFEECYFELANIVPLYNKIRNYITQKPYSDEKFKLNFENSTLANGWDKNKEPDNTAILFIKDDKYYLGVMNKKNNKIFDDKAIKENKGEGYKKIVYKLLPGANKMLPKVFFSAKSIKFYNPSEDILRIRNHSTHTKNGSPQKGYEKFEFNIEDCRKFIDFYKQSISKHPEWKDFGFRFSDTQRYNSIDEFYREVENQGYKLTFENISESYIDSVVNQGKLYLFQIYNKDFSAYSKGRPNLHTLYWKALFDERNLQDVVYKLNGEAELFYRKQSIPKKITHPAKEAIANKNKDNPKKESVFEYDLIKDKRFTEDKFFFHCPITINFKSSGANKFNDEINLLLKEKANDVHILSIARGERHLAYYTLVDGKGNIIKQDTFNIIGNDRMKTNYHDKLAAIEKDRDSARKDWKKINNIKEMKEGYLSQVVHEIAKLVIEYNAIVVFADLNFGFKRGRFKVEKQVYQKLEKMLIEKLNYLVFKDNEFDKTGGVLRAYQLTAPFETFKKMGKQTGIIYYVPAGFTSKICPVTGFVNQLYPKYESVSKSQEFFSKFDKICYNLDKGYFEFSFDYKNFGDKAAKGKWTIASFGSRLINFRNSDKNHNWDTREVYPTKELEKLLKDYSIEYGHGECIKAAICGESDKKFFAKLTSVLNTILQMRNSKTGTELDYLISPVADVNGNFFDSRQAPKNMPQDADANGAYHIGLKGLMLLGRIKNNQEGKKLNLVIKNEEYFEFVQNRNN

SEQ ID NO: 215 - protein, 1300 aa, Francisella tularensis
  REGION 1..1300: note = MISC_FEATURE - Cpf1 D917A/D1255A polypeptide sequence
  source 1..1300: note = subspecies novicida
MSIYQEFVNKYSLSKTLRFELIPQGKTLENIKARGLILDDEKRAKDYKKAKQIIDKYHQFFIEEILSSVCISEDLLQNYSDVYFKLKKSDDDNLQKDFKSAKDTIKKQISEYIKDSEKFKNLFNQNLIDAKKGQESDLILWLKQSKDNGIELFKANSDITDIDEALEIIKSFKGWTTYFKGFHENRKNVYSSNDIPTSIIYRIVDDNLPKFLENKAKYESLKDKAPEAINYEQIKKDLAEELTFDIDYKTSEVNQRVFSLDEVFEIANFNNYLNQSGITKFNTIIGGKFVNGENTKRKGINEYINLYSQQINDKTLKKYKMSVLFKQILSDTESKSFVIDKLEDDSDVVTTMQSFYEQIAAFKTVEEKSIKETLSLLFDDLKAQKLDLSKIYFKNDKSLTDLSQQVFDDYSVIGTAVLEYITQQIAPKNLDNPSKKEQELIAKKTEKAKYLSLETIKLALEEFNKHRDIDKQCRFEEILANFAAIPMIFDEIAQNKDNLAQISIKYQNQGKKDLLQASAEDDVKAIKDLLDQTNNLLHKLKIFHISQSEDKANILDKDEHFYLVFEECYFELANIVPLYNKIRNYITQKPYSDEKFKLNFENSTLANGWDKNKEPDNTAILFIKDDKYYLGVMNKKNNKIFDDKAIKENKGEGYKKIVYKLLPGANKMLPKVFFSAKSIKFYNPSEDILRIRNHSTHTKNGSPQKGYEKFEFNIEDCRKFIDFYKQSISKHPEWKDFGFRFSDTQRYNSIDEFYREVENQGYKLTFENISESYIDSVVNQGKLYLFQIYNKDFSAYSKGRPNLHTLYWKALFDERNLQDVVYKLNGEAELFYRKQSIPKKITHPAKEAIANKNKDNPKKESVFEYDLIKDKRFTEDKFFFHCPITINFKSSGANKFNDEINLLLKEKANDVHILSIARGERHLAYYTLVDGKGNIIKQDTFNIIGNDRMKTNYHDKLAAIEKDRDSARKDWKKINNIKEMKEGYLSQVVHEIAKLVIEYNAIVVFEDLNFGFKRGRFKVEKQVYQKLEKMLIEKLNYLVFKDNEFDKTGGVLRAYQLTAPFETFKKMGKQTGIIYYVPAGFTSKICPVTGFVNQLYPKYESVSKSQEFFSKFDKICYNLDKGYFEFSFDYKNFGDKAAKGKWTIASFGSRLINFRNSDKNHNWDTREVYPTKELEKLLKDYSIEYGHGECIKAAICGESDKKFFAKLTSVLNTILQMRNSKTGTELDYLISPVADVNGNFFDSRQAPKNMPQDAAANGAYHIGLKGLMLLGRIKNNQEGKKLNLVIKNEEYFEFVQNRNN

SEQ ID NO: 216 - protein, 1300 aa, Francisella tularensis
  REGION 1..1300: note = MISC_FEATURE - Cpf1 E1006A/D1255A polypeptide sequence
  source 1..1300: note = subspecies novicida
MSIYQEFVNKYSLSKTLRFELIPQGKTLENIKARGLILDDEKRAKDYKKAKQIIDKYHQFFIEEILSSVCISEDLLQNYSDVYFKLKKSDDDNLQKDFKSAKDTIKKQISEYIKDSEKFKNLFNQNLIDAKKGQESDLILWLKQSKDNGIELFKANSDITDIDEALEIIKSFKGWTTYFKGFHENRKNVYSSNDIPTSIIYRIVDDNLPKFLENKAKYESLKDKAPEAINYEQIKKDLAEELTFDIDYKTSEVNQRVFSLDEVFEIANFNNYLNQSGITKFNTIIGGKFVNGENTKRKGINEYINLYSQQINDKTLKKYKMSVLFKQILSDTESKSFVIDKLEDDSDVVTTMQSFYEQIAAFKTVEEKSIKETLSLLFDDLKAQKLDLSKIYFKNDKSLTDLSQQVFDDYSVIGTAVLEYITQQIAPKNLDNPSKKEQELIAKKTEKAKYLSLETIKLALEEFNKHRDIDKQCRFEEILANFAAIPMIFDEIAQNKDNLAQISIKYQNQGKKDLLQASAEDDVKAIKDLLDQTNNLLHKLKIFHISQSEDKANILDKDEHFYLVFEECYFELANIVPLYNKIRNYITQKPYSDEKFKLNFENSTLANGWDKNKEPDNTAILFIKDDKYYLGVMNKKNNKIFDDKAIKENKGEGYKKIVYKLLPGANKMLPKVFFSAKSIKFYNPSEDILRIRNHSTHTKNGSPQKGYEKFEFNIEDCRKFIDFYKQSISKHPEWKDFGFRFSDTQRYNSIDEFYREVENQGYKLTFENISESYIDSVVNQGKLYLFQIYNKDFSAYSKGRPNLHTLYWKALFDERNLQDVVYKLNGEAELFYRKQSIPKKITHPAKEAIANKNKDNPKKESVFEYDLIKDKRFTEDKFFFHCPITINFKSSGANKFNDEINLLLKEKANDVHILSIDRGERHLAYYTLVDGKGNIIKQDTFNIIGNDRMKTNYHDKLAAIEKDRDSARKDWKKINNIKEMKEGYLSQVVHEIAKLVIEYNAIVVFADLNFGFKRGRFKVEKQVYQKLEKMLIEKLNYLVFKDNEFDKTGGVLRAYQLTAPFETFKKMGKQTGIIYYVPAGFTSKICPVTGFVNQLYPKYESVSKSQEFFSKFDKICYNLDKGYFEFSFDYKNFGDKAAKGKWTIASFGSRLINFRNSDKNHNWDTREVYPTKELEKLLKDYSIEYGHGECIKAAICGESDKKFFAKLTSVLNTILQMRNSKTGTELDYLISPVADVNGNFFDSRQAPKNMPQDAAANGAYHIGLKGLMLLGRIKNNQEGKKLNLVIKNEEYFEFVQNRNN

SEQ ID NO: 217 - protein, 1300 aa, Francisella tularensis
  REGION 1..1300: note = MISC_FEATURE - Cpf1 D917A/E1006A/D1255A polypeptide sequence
  source 1..1300: note = subspecies novicida
MSIYQEFVNKYSLSKTLRFELIPQGKTLENIKARGLILDDEKRAKDYKKAKQIIDKYHQFFIEEILSSVCISEDLLQNYSDVYFKLKKSDDDNLQKDFKSAKDTIKKQISEYIKDSEKFKNLFNQNLIDAKKGQESDLILWLKQSKDNGIELFKANSDITDIDEALEIIKSFKGWTTYFKGFHENRKNVYSSNDIPTSIIYRIVDDNLPKFLENKAKYESLKDKAPEAINYEQIKKDLAEELTFDIDYKTSEVNQRVFSLDEVFEIANFNNYLNQSGITKFNTIIGGKFVNGENTKRKGINEYINLYSQQINDKTLKKYKMSVLFKQILSDTESKSFVIDKLEDDSDVVTTMQSFYEQIAAFKTVEEKSIKETLSLLFDDLKAQKLDLSKIYFKNDKSLTDLSQQVFDDYSVIGTAVLEYITQQIAPKNLDNPSKKEQELIAKKTEKAKYLSLETIKLALEEFNKHRDIDKQCRFEEILANFAAIPMIFDEIAQNKDNLAQISIKYQNQGKKDLLQASAEDDVKAIKDLLDQTNNLLHKLKIFHISQSEDKANILDKDEHFYLVFEECYFELANIVPLYNKIRNYITQKPYSDEKFKLNFENSTLANGWDKNKEPDNTAILFIKDDKYYLGVMNKKNNKIFDDKAIKENKGEGYKKIVYKLLPGANKMLPKVFFSAKSIKFYNPSEDILRIRNHSTHTKNGSPQKGYEKFEFNIEDCRKFIDFYKQSISKHPEWKDFGFRFSDTQRYNSIDEFYREVENQGYKLTFENISESYIDSVVNQGKLYLFQIYNKDFSAYSKGRPNLHTLYWKALFDERNLQDVVYKLNGEAELFYRKQSIPKKITHPAKEAIANKNKDNPKKESVFEYDLIKDKRFTEDKFFFHCPITINFKSSGANKFNDEINLLLKEKANDVHILSIARGERHLAYYTLVDGKGNIIKQDTFNIIGNDRMKTNYHDKLAAIEKDRDSARKDWKKINNIKEMKEGYLSQVVHEIAKLVIEYNAIVVFADLNFGFKRGRFKVEKQVYQKLEKMLIEKLNYLVFKDNEFDKTGGVLRAYQLTAPFETFKKMGKQTGIIYYVPAGFTSKICPVTGFVNQLYPKYESVSKSQEFFSKFDKICYNLDKGYFEFSFDYKNFGDKAAKGKWTIASFGSRLINFRNSDKNHNWDTREVYPTKELEKLLKDYSIEYGHGECIKAAICGESDKKFFAKLTSVLNTILQMRNSKTGTELDYLISPVADVNGNFFDSRQAPKNMPQDAAANGAYHIGLKGLMLLGRIKNNQEGKKLNLVIKNEEYFEFVQNRNN

SEQ ID NO: 218 - protein, 1052 aa, Staphylococcus aureus
  REGION 1..1052: note = MISC_FEATURE - Exemplary SaCas9 polypeptide sequence
KRNYILGLDIGITSVGYGIIDYETRDVIDAGVRLFKEANVENNEGRRSKRGARRLKRRRRHRIQRVKKLLFDYNLLTDHSELSGINPYEARVKGLSQKLSEEEFSAALLHLAKRRGVHNVNEVEEDTGNELSTKEQISRNSKALEEKYVAELQLERLKKDGEVRGSINRFKTSDYVKEAKQLLKVQKAYHQLDQSFIDTYIDLLETRRTYYEGPGEGSPFGWKDIKEWYEMLMGHCTYFPEELRSVKYAYNADLYNALNDLNNLVITRDENEKLEYYEKFQIIENVFKQKKKPTLKQIAKEILVNEEDIKGYRVTSTGKPEFTNLKVYHDIKDITARKEIIENAELLDQIAKILTIYQSSEDIQEELTNLNSELTQEEIEQISNLKGYTGTHNLSLKAINLILDELWHTNDNQIAIFNRLKLVPKKVDLSQQKEIPTTLVDDFILSPVVKRSFIQSIKVINAIIKKYGLPNDIIIELAREKNSKDAQKMINEMQKRNRQTNERIEEIIRTTGKENAKYLIEKIKLHDMQEGKCLYSLEAIPLEDLLNNPFNYEVDHIIPRSVSFDNSFNNKVLVKQEENSKKGNRTPFQYLSSSDSKISYETFKKHILNLAKGKGRISKTKKEYLLEERDINRFSVQKDFINRNLVDTRYATRGLMNLLRSYFRVNNLDVKVKSINGGFTSFLRRKWKFKKERNKGYKHHAEDALIIANADFIFKEWKKLDKAKKVMENQMFEEKQAESMPEIETEQEYKEIFITPHQIKHIKDFKDYKYSHRVDKKPNRELINDTLYSTRKDDKGNTLIVNNLNGLYDKDNDKLKKLINKSPEKLLMYHHDPQTYQKLKLIMEQYGDEKNPLYKYYEETGNYLTKYSKKDNGPVIKKIKYYGNKLNAHLDITDDYPNSRNKVVKLSLKPYRFDVYLDNGVYKFVTVKNLDVIKKENYYEVNSKCYEEAKKLKKISNQAEFIASFYNNDLIKINGELYRVIGVNNDLLNRIEVNMIDITYREYLENMNDKRPPRIIKTIASKTQSIKKYSTDILGNLYEVKSKKHPQIIKKG

SEQ ID NO: 219 - protein, 1052 aa, Staphylococcus aureus
  REGION 1..1052: note = MISC_FEATURE - SaCas9n polypeptide sequence
KRNYILGLDIGITSVGYGIIDYETRDVIDAGVRLFKEANVENNEGRRSKRGARRLKRRRRHRIQRVKKLLFDYNLLTDHSELSGINPYEARVKGLSQKLSEEEFSAALLHLAKRRGVHNVNEVEEDTGNELSTKEQISRNSKALEEKYVAELQLERLKKDGEVRGSINRFKTSDYVKEAKQLLKVQKAYHQLDQSFIDTYIDLLETRRTYYEGPGEGSPFGWKDIKEWYEMLMGHCTYFPEELRSVKYAYNADLYNALNDLNNLVITRDENEKLEYYEKFQIIENVFKQKKKPTLKQIAKEILVNEEDIKGYRVTSTGKPEFTNLKVYHDIKDITARKEIIENAELLDQIAKILTIYQSSEDIQEELTNLNSELTQEEIEQISNLKGYTGTHNLSLKAINLILDELWHTNDNQIAIFNRLKLVPKKVDLSQQKEIPTTLVDDFILSPVVKRSFIQSIKVINAIIKKYGLPNDIIIELAREKNSKDAQKMINEMQKRNRQTNERIEEIIRTTGKENAKYLIEKIKLHDMQEGKCLYSLEAIPLEDLLNNPFNYEVDHIIPRSVSFDNSFNNKVLVKQEEASKKGNRTPFQYLSSSDSKISYETFKKHILNLAKGKGRISKTKKEYLLEERDINRFSVQKDFINRNLVDTRYATRGLMNLLRSYFRVNNLDVKVKSINGGFTSFLRRKWKFKKERNKGYKHHAEDALIIANADFIFKEWKKLDKAKKVMENQMFEEKQAESMPEIETEQEYKEIFITPHQIKHIKDFKDYKYSHRVDKKPNRELINDTLYSTRKDDKGNTLIVNNLNGLYDKDNDKLKKLINKSPEKLLMYHHDPQTYQKLKLIMEQYGDEKNPLYKYYEETGNYLTKYSKKDNGPVIKKIKYYGNKLNAHLDITDDYPNSRNKVVKLSLKPYRFDVYLDNGVYKFVTVKNLDVIKKENYYEVNSKCYEEAKKLKKISNQAEFIASFYNNDLIKINGELYRVIGVNNDLLNRIEVNMIDITYREYLENMNDKRPPRIIKTIASKTQSIKKYSTDILGNLYEVKSKKHPQIIKKG

SEQ ID NO: 220 - protein, 1052 aa, Staphylococcus aureus
  REGION 1..1052: note = MISC_FEATURE - SaKKH Cas9 polypeptide sequence
KRNYILGLDIGITSVGYGIIDYETRDVIDAGVRLFKEANVENNEGRRSKRGARRLKRRRRHRIQRVKKLLFDYNLLTDHSELSGINPYEARVKGLSQKLSEEEFSAALLHLAKRRGVHNVNEVEEDTGNELSTKEQISRNSKALEEKYVAELQLERLKKDGEVRGSINRFKTSDYVKEAKQLLKVQKAYHQLDQSFIDTYIDLLETRRTYYEGPGEGSPFGWKDIKEWYEMLMGHCTYFPEELRSVKYAYNADLYNALNDLNNLVITRDENEKLEYYEKFQIIENVFKQKKKPTLKQIAKEILVNEEDIKGYRVTSTGKPEFTNLKVYHDIKDITARKEIIENAELLDQIAKILTIYQSSEDIQEELTNLNSELTQEEIEQISNLKGYTGTHNLSLKAINLILDELWHTNDNQIAIFNRLKLVPKKVDLSQQKEIPTTLVDDFILSPVVKRSFIQSIKVINAIIKKYGLPNDIIIELAREKNSKDAQKMINEMQKRNRQTNERIEEIIRTTGKENAKYLIEKIKLHDMQEGKCLYSLEAIPLEDLLNNPFNYEVDHIIPRSVSFDNSFNNKVLVKQEEASKKGNRTPFQYLSSSDSKISYETFKKHILNLAKGKGRISKTKKEYLLEERDINRFSVQKDFINRNLVDTRYATRGLMNLLRSYFRVNNLDVKVKSINGGFTSFLRRKWKFKKERNKGYKHHAEDALIIANADFIFKEWKKLDKAKKVMENQMFEEKQAESMPEIETEQEYKEIFITPHQIKHIKDFKDYKYSHRVDKKPNRKLINDTLYSTRKDDKGNTLIVNNLNGLYDKDNDKLKKLINKSPEKLLMYHHDPQTYQKLKLIMEQYGDEKNPLYKYYEETGNYLTKYSKKDNGPVIKKIKYYGNKLNAHLDITDDYPNSRNKVVKLSLKPYRFDVYLDNGVYKFVTVKNLDVIKKENYYEVNSKCYEEAKKLKKISNQAEFIASFYKNDLIKINGELYRVIGVNNDLLNRIEVNMIDITYREYLENMNDKRPPHIIKTIASKTQSIKKYSTDILGNLYEVKSKKHPQIIKKG

SEQ ID NO: 221 - protein, 707 aa, synthetic construct
  REGION 1..707: note = Casphi-1 polypeptide sequence
MADTPTLFTQFLRHHLPGQRFRKDILKQAGRILANKGEDATIAFLRGKSEESPPDFQPPVKCPIIACSRPLTEWPIYQASVAIQGYVYGQSLAEFEASDPGCSKDGLLGWFDKTGVCTDYFSVQGLNLIFQNARKRYIGVQTKVTNRNEKRHKKLKRINAKRIAEGLPELTSDEPESALDETGHLIDPPGLNTNIYCYQQVSPKPLALSEVNQLPTAYAGYSTSGDDPIQPMVTKDRLSISKGQPGYIPEHQRALLSQKKHRRMRGYGLKARALLVIVRIQDDWAVIDLRSLLRNAYWRRIVQTKEPSTITKLLKLVTGDPVLDATRMVATFTYKPGIVQVRSAKCLKNKQGSKLFSERYLNETVSVTSIDLGSNNLVAVATYRLVNGNTPELLQRFTLPSHLVKDFERYKQAHDTLEDSIQKTAVASLPQGQQTEIRMWSMYGFREAQERVCQELGLADGSIPWNVMTATSTILTDLFLARGGDPKKCMFTSEPKKKKNSKQVLYKIRDRAWAKMYRTLLSKETREAWNKALWGLKRGSPDYARLSKRKEELARRCVNYTISTAEKRAQCGRTIVALEDLNIGFFHGRGKQEPGWVGLFTRKKENRWLMQALHKAFLELAHHRGYHVIEVNPAYTSQTCPVCRHCDPDNRDQHNREAFHCIGCGFRGNADLDVATHNIAMVAITGESLKRARGSVASKTPQPLAAE

SEQ ID NO: 222 - protein, 757 aa, synthetic construct
  REGION 1..757: note = Casphi-2 polypeptide sequence
MPKPAVESEFSKVLKKHFPGERFRSSYMKRGGKILAAQGEEAVVAYLQGKSEEEPPNFQPPAKCHVVTKSRDFAEWPIMKASEAIQRYIYALSTTERAACKPGKSSESHAAWFAATGVSNHGYSHVQGLNLIFDHTLGRYDGVLKKVQLRNEKARARLESINASRADEGLPEIKAEEEEVATNETGHLLQPPGINPSFYVYQTISPQAYRPRDEIVLPPEYAGYVRDPNAPIPLGVVRNRCDIQKGCPGYIPEWQREAGTAISPKTGKAVTVPGLSPKKNKRMRRYWRSEKEKAQDALLVTVRIGTDWVVIDVRGLLRNARWRTIAPKDISLNALLDLFTGDPVIDVRRNIVTFTYTLDACGTYARKWTLKGKQTKATLDKLTATQTVALVAIDLGQTNPISAGISRVTQENGALQCEPLDRFTLPDDLLKDISAYRIAWDRNEEELRARSVEALPEAQQAEVRALDGVSKETARTQLCADFGLDPKRLPWDKMSSNTTFISEALLSNSVSRDQVFFTPAPKKGAKKKAPVEVMRKDRTWARAYKPRLSVEAQKLKNEALWALKRTSPEYLKLSRRKEELCRRSINYVIEKTRRRTQCQIVIPVIEDLNVRFFHGSGKRLPGWDNFFTAKKENRWFIQGLHKAFSDLRTHRSFYVFEVRPERTSITCPKCGHCEVGNRDGEAFQCLSCGKTCNADLDVATHNLTQVALTGKTMPKREEPRDAQGTAPARKTKKASKSKAPPAEREDQTPAQEPSQTS

SEQ ID NO: 223 - protein, 766 aa, synthetic construct
  REGION 1..766: note = Casphi-3 polypeptide sequence
MEKEITELTKIRREFPNKKFSSTDMKKAGKLLKAEGPDAVRDFLNSCQEIIGDFKPPVKTNIVSISRPFEEWPVSMVGRAIQEYYFSLTKEELESVHPGTSSEDHKSFFNITGLSNYNYTSVQGLNLIFKNAKAIYDGTLVKANNKNKKLEKKFNEINHKRSLEGLPIITPDFEEPFDENGHLNNPPGINRNIYGYQGCAAKVFVPSKHKMVSLPKEYEGYNRDPNLSLAGFRNRLEIPEGEPGHVPWFQRMDIPEGQIGHVNKIQRFNFVHGKNSGKVKFSDKTGRVKRYHHSKYKDATKPYKFLEESKKVSALDSILAIITIGDDWVVFDIRGLYRNVFYRELAQKGLTAVQLLDLFTGDPVIDPKKGVVTFSYKEGVVPVFSQKIVPRFKSRDTLEKLTSQGPVALLSVDLGQNEPVAARVCSLKNINDKITLDNSCRISFLDDYKKQIKDYRDSLDELEIKIRLEAINSLETNQQVEIRDLDVFSADRAKANTVDMFDIDPNLISWDSMSDARVSTQISDLYLKNGGDESRVYFEINNKRIKRSDYNISQLVRPKLSDSTRKNLNDSIWKLKRTSEEYLKLSKRKLELSRAVVNYTIRQSKLLSGINDIVIILEDLDVKKKFNGRGIRDIGWDNFFSSRKENRWFIPAFHKAFSELSSNRGLCVIEVNPAWTSATCPDCGFCSKENRDGINFTCRKCGVSYHADIDVATLNIARVAVLGKPMSGPADRERLGDTKKPRVARSRKTMKRKDISNSTVEAMVTA

SEQ ID NO: 224 - protein, 765 aa, synthetic construct
  REGION 1..765: note = Casphi-4 polypeptide sequence
MYSLEMADLKSEPSLLAKLLRDRFPGKYWLPKYWKLAEKKRLTGGEEAACEYMADKQLDSPPPNFRPPARCVILAKSRPFEDWPVHRVASKAQSFVIGLSEQGFAALRAAPPSTADARRDWLRSHGASEDDLMALEAQLLETIMGNAISLHGGVLKKIDNANVKAAKRLSGRNEARLNKGLQELPPEQEGSAYGADGLLVNPPGLNLNIYCRKSCCPKPVKNTARFVGHYPGYLRDSDSILISGTMDRLTIIEGMPGHIPAWQREQGLVKPGGRRRRLSGSESNMRQKVDPSTGPRRSTRSGTVNRSNQRTGRNGDPLLVEIRMKEDWVLLDARGLLRNLRWRESKRGLSCDHEDLSLSGLLALFSGDPVIDPVRNEVVFLYGEGIIPVRSTKPVGTRQSKKLLERQASMGPLTLISCDLGQTNLIAGRASAISLTHGSLGVRSSVRIELDPEIIKSFERLRKDADRLETEILTAAKETLSDEQRGEVNSHEKDSPQTAKASLCRELGLHPPSLPWGQMGPSTTFIADMLISHGRDDDAFLSHGEFPTLEKRKKFDKRFCLESRPLLSSETRKALNESLWEVKRTSSEYARLSQRKKEMARRAVNFVVEISRRKTGLSNVIVNIEDLNVRIFHGGGKQAPGWDGFFRPKSENRWFIQAIHKAFSDLAAHHGIPVIESDPQRTSMTCPECGHCDSKNRNGVRFLCKGCGASMDADFDAACRNLERVALTGKPMPKPSTSCERLLSATTGKVCSDHSLSHDAIEKAS

SEQ ID NO: 225 - protein, 793 aa, synthetic construct
  REGION 1..793: note = Casphi-5 polypeptide sequence
MSSLPTPLELLKQKHADLFKGLQFSSKDNKMAGKVLKKDGEEAALAFLSERGVSRGELPNFRPPAKTLVVAQSRPFEEFPIYRVSEAIQLYVYSLSVKELETVPSGSSTKKEHQRFFQDSSVPDFGYTSVQGLNKIFGLARGIYLGVITRGENQLQKAKSKHEALNKKRRASGEAETEFDPTPYEYMTPERKLAKPPGVNHSIMCYVDISVDEFDFRNPDGIVLPSEYAGYCREINTAIEKGTVDRLGHLKGGPGYIPGHQRKESTTEGPKINFRKGRIRRSYTALYAKRDSRRVRQGKLALPSYRHHMMRLNSNAESAILAVIFFGKDWVVFDLRGLLRNVRWRNLFVDGSTPSTLLGMFGDPVIDPKRGVVAFCYKEQIVPVVSKSITKMVKAPELLNKLYLKSEDPLVLVAIDLGQTNPVGVGVYRVMNASLDYEVVTRFALESELLREIESYRQRTNAFEAQIRAETFDAMTSEEQEEITRVRAFSASKAKENVCHRFGMPVDAVDWATMGSNTIHIAKWVMRHGDPSLVEVLEYRKDNEIKLDKNGVPKKVKLTDKRIANLTSIRLRFSQETSKHYNDTMWELRRKHPVYQKLSKSKADFSRRVVNSIIRRVNHLVPRARIVFIIEDLKNLGKVFHGSGKRELGWDSYFEPKSENRWFIQVLHKAFSETGKHKGYYIIECWPNWTSCTCPKCSCCDSENRHGEVFRCLACGYTCNTDFGTAPDNLVKIATTGKGLPGPKKRCKGSSKGKNPKIARSSETGVSVTESGAPKVKKSSPTQTSQSSSQSAP

SEQ ID NO: 226 - protein, 441 aa, synthetic construct
  REGION 1..441: note = Casphi-6 polypeptide sequence
MNKIEKEKTPLAKLMNENFAGLRFPFAIIKQAGKKLLKEGELKTIEYMTGKGSIEPLPNFKPPVKCLIVAKRRDLKYFPICKASCEIQSYVYSLNYKDFMDYFSTPMTSQKQHEEFFKKSGLNIEYQNVAGLNLIFNNVKNTYNGVILKVKNRNEKLKKKAIKNNYEFEEIKTFNDDGCLINKPGINNVIYCFQSISPKILKNITHLPKEYNDYDCSVDRNIIQKYVSRLDIPESQPGHVPEWQRKLPEFNNTNNPRRRRKWYSNGRNISKGYSVDQVNQAKIEDSLLAQIKIGEDWIILDIRGLLRDLNRRELISYKNKLTIKDVLGFFSDYPIIDIKKNLVTFCYKEGVIQVVSQKSIGNKKSKQLLEKLIENKPIALVSIDLGQTNPVSVKISKLNKINNKISIESFTYRFLNEEILKEIEKYRKDYDKLELKLINEA

SEQ ID NO: 227 - protein, 772 aa, synthetic construct
  REGION 1..772: note = Casphi-7 polypeptide sequence
MSNTAVSTREHMSNKTTPPSPLSLLLRAHFPGLKFESQDYKIAGKKLRDGGPEAVISYLTGKGQAKLKDVKPPAKAFVIAQSRPFIEWDLVRVSRQIQEKIFGIPATKGRPKQDGLSETAFNEAVASLEVDGKSKLNEETRAAFYEVLGLDAPSLHAQAQNALIKSAISIREGVLKKVENRNEKNLSKTKRRKEAGEEATFVEEKAHDERGYLIHPPGVNQTIPGYQAVVIKSCPSDFIGLPSGCLAKESAEALTDYLPHDRMTIPKGQPGYVPEWQHPLLNRRKNRRRRDWYSASLNKPKATCSKRSGTPNRKNSRTDQIQSGRFKGAIPVLMRFQDEWVIIDIRGLLRNARYRKLLKEKSTIPDLLSLFTGDPSIDMRQGVCTFIYKAGQACSAKMVKTKNAPEILSELTKSGPVVLVSIDLGQTNPIAAKVSRVTQLSDGQLSHETLLRELLSNDSSDGKEIARYRVASDRLRDKLANLAVERLSPEHKSEILRAKNDTPALCKARVCAALGLNPEMIAWDKMTPYTEFLATAYLEKGGDRKVATLKPKNRPEMLRRDIKFKGTEGVRIEVSPEAAEAYREAQWDLQRTSPEYLRLSTWKQELTKRILNQLRHKAAKSSQCEVVVMAFEDLNIKMMHGNGKWADGGWDAFFIKKRENRWFMQAFHKSLTELGAHKGVPTIEVTPHRTSITCTKCGHCDKANRDGERFACQKCGFVAHADLEIATDNIERVALTGKPMPKPESERSGDAKKSVGARKAAFKPEEDAEAAE

SEQ ID NO: 228 - protein, 717 aa, synthetic construct
  REGION 1..717: note = Casphi-8 polypeptide sequence
MIKPTVSQFLTPGFKLIRNHSRTAGLKLKNEGEEACKKFVRENEIPKDECPNFQGGPAIANIIAKSREFTEWEIYQSSLAIQEVIFTLPKDKLPEPILKEEWRAQWLSEHGLDTVPYKEAAGLNLIIKNAVNTYKGVQVKVDNKNKNNLAKINRKNEIAKLNGEQEISFEEIKAFDDKGYLLQKPSPNKSIYCYQSVSPKPFITSKYHNVNLPEEYIGYYRKSNEPIVSPYQFDRLRIPIGEPGYVPKWQYTFLSKKENKRRKLSKRIKNVSPILGIICIKKDWCVFDMRGLLRTNHWKKYHKPTDSINDLFDYFTGDPVIDTKANVVRFRYKMENGIVNYKPVREKKGKELLENICDQNGSCKLATVDVGQNNPVAIGLFELKKVNGELTKTLISRHPTPIDFCNKITAYRERYDKLESSIKLDAIKQLTSEQKIEVDNYNNNFTPQNTKQIVCSKLNINPNDLPWDKMISGTHFISEKAQVSNKSEIYFTSTDKGKTKDVMKSDYKWFQDYKPKLSKEVRDALSDIEWRLRRESLEFNKLSKSREQDARQLANWISSMCDVIGIENLVKKNNFFGGSGKREPGWDNFYKPKKENRWWINAIHKALTELSQNKGKRVILLPAMRTSITCPKCKYCDSKNRNGEKFNCLKCGIELNADIDVATENLATVAITAQSMPKPTCERSGDAKKPVRARKAKAPEFHDKLAPSYTVVLREAV

SEQ ID NO: 229 - protein, 793 aa, synthetic construct
  REGION 1..793: note = Casphi-9 polypeptide sequence
MRSSREIGDKILMRQPAEKTAFQVFRQEVIGTQKLSGGDAKTAGRLYKQGKMEAAREWLLKGARDDVPPNFQPPAKCLVVAVSHPFEEWDISKTNHDVQAYIYAQPLQAEGHLNGLSEKWEDTSADQHKLWFEKTGVPDRGLPVQAINKIAKAAVNRAFGVVRKVENRNEKRRSRDNRIAEHNRENGLTEVVREAPEVATNADGFLLHPPGIDPSILSYASVSPVPYNSSKHSFVRLPEEYQAYNVEPDAPIPQFVVEDRFAIPPGQPGYVPEWQRLKCSTNKHRRMRQWSNQDYKPKAGRRAKPLEFQAHLTRERAKGALLVVMRIKEDWVVFDVRGLLRNVEWRKVLSEEAREKLTLKGLLDLFTGDPVIDTKRGIVTFLYKAEITKILSKRTVKTKNARDLLLRLTEPGEDGLRREVGLVAVDLGQTHPIAAAIYRIGRTSAGALESTVLHRQGLREDQKEKLKEYRKRHTALDSRLRKEAFETLSVEQQKEIVTVSGSGAQITKDKVCNYLGVDPSTLPWEKMGSYTHFISDDFLRRGGDPNIVHFDRQPKKGKVSKKSQRIKRSDSQWVGRMRPRLSQETAKARMEADWAAQNENEEYKRLARSKQELARWCVNTLLQNTRCITQCDEIVVVIEDLNVKSLHGKGAREPGWDNFFTPKTENRWFIQILHKTFSELPKHRGEHVIEGCPLRTSITCPACSYCDKNSRNGEKFVCVACGATFHADFEVATYNLVRLATTGMPMPKSLERQGGGEKAGGARKARKKAKQVEKIVVQANANVTMNGASLHSP

SEQ ID NO: 230 - protein, 812 aa, synthetic construct
  REGION 1..812: note = Casphi-10 polypeptide sequence
MDMLDTETNYATETPAQQQDYSPKPPKKAQRAPKGFSKKARPEKKPPKPITLFTQKHFSGVRFLKRVIRDASKILKLSESRTITFLEQAIERDGSAPPDVTPPVHNTIMAVTRPFEEWPEVILSKALQKHCYALTKKIKIKTWPKKGPGKKCLAAWSARTKIPLIPGQVQATNGLFDRIGSIYDGVEKKVTNRNANKKLEYDEAIKEGRNPAVPEYETAYNIDGTLINKPGYNPNLYITQSRTPRLITEADRPLVEKILWQMVEKKTQSRNQARRARLEKAAHLQGLPVPKFVPEKVDRSQKIEIRIIDPLDKIEPYMPQDRMAIKASQDGHVPYWQRPFLSKRRNRRVRAGWGKQVSSIQAWLTGALLVIVRLGNEAFLADIRGALRNAQWRKLLKPDATYQSLFNLFTGDPVVNTRTNHLTMAYREGVVNIVKSRSFKGRQTREHLLTLLGQGKTVAGVSFDLGQKHAAGLLAAHFGLGEDGNPVFTPIQACFLPQRYLDSLTNYRNRYDALTLDMRRQSLLALTPAQQQEFADAQRDPGGQAKRACCLKLNLNPDEIRWDLVSGISTMISDLYIERGGDPRDVHQQVETKPKGKRKSEIRILKIRDGKWAYDFRPKIADETRKAQREQLWKLQKASSEFERLSRYKINIARAIANWALQWGRELSGCDIVIPVLEDLNVGSKFFDGKGKWLLGWDNRFTPKKENRWFIKVLHKAVAELAPHRGVPVYEVMPHRTSMTCPACHYCHPTNREGDRFECQSCHVVKNTDRDVAPYNILRVAVEGKTLDRWQAEKKPQAEPDRPMILIDNQES

SEQ ID NO: 231 - protein, 84 aa, synthetic construct
  REGION 1..84: note = synthetic polypeptide sequence
MTNLSDIIEKETGKQLVIQESILMLPEEVEEVIGNKPESDILVHTAYDESTDENVMLLTSDAPEYKPWALVIQDSNGENKIKML

SEQ ID NO: 232 - protein, 1129 aa, Alicyclobacillus acidoterrestris
  REGION 1..1129: note = MISC_FEATURE - Cas12b/C2c1; sp|T0D7A2|C2C1_ALIAG CRISPR-associated endonuclease C2c1 OS = Alicyclobacillus acido-terrestris (strain ATCC 49025 /DSM 3922/ CIP 106132 / NCIMB 13137/GD3B) GN=c2c1 PE=1 SV=1; Cas12b/C2c1 polypeptide sequence
MAVKSIKVKLRLDDMPEIRAGLWKLHKEVNAGVRYYTEWLSLLRQENLYRRSPNGDGEQECDKTAEECKAELLERLRARQVENGHRGPAGSDDELLQLARQLYELLVPQAIGAKGDAQQIARKFLSPLADKDAVGGLGIAKAGNKPRWVRMREAGEPGWEEEKEKAETRKSADRTADVLRALADFGLKPLMRVYTDSEMSSVEWKPLRKGQAVRTWDRDMFQQAIERMMSWESWNQRVGQEYAKLVEQKNRFEQKNFVGQEHLVHLVNQLQQDMKEASPGLESKEQTAHYVTGRALRGSDKVFEKWGKLAPDAPFDLYDAEIKNVQRRNTRRFGSHDLFAKLAEPEYQALWREDASFLTRYAVYNSILRKLNHAKMFATFTLPDATAHPIWTRFDKLGGNLHQYTFLFNEFGERRHAIRFHKLLKVENGVAREVDDVTVPISMSEQLDNLLPRDPNEPIALYFRDYGAEQHFTGEFGGAKIQCRRDQLAHMHRRRGARDVYLNVSVRVQSQSEARGERRPPYAAVFRLVGDNHRAFVHFDKLSDYLAEHPDDGKLGSEGLLSGLRVMSVDLGLRTSASISVFRVARKDELKPNSKGRVPFFFPIKGNDNLVAVHERSQLLKLPGETESKDLRAIREERQRTLRQLRTQLAYLRLLVRCGSEDVGRRERSWAKLIEQPVDAANHMTPDWREAFENELQKLKSLHGICSDKEWMDAVYESVRRVWRHMGKQVRDWRKDVRSGERPKIRGYAKDVVGGNSIEQIEYLERQYKFLKSWSFFGKVSGQVIRAEKGSRFAITLREHIDHAKEDRLKKLADRIIMEALGYVYALDERGKGKWVAKYPPCQLILLEELSEYQFNNDRPPSENNQLMQWSHRGVFQELINQAQVHDLLVGTMYAAFSSRFDARTGAPGIRCRRVPARCTQEHNPEPFPWWLNKFVVEHTLDACPLRADDLIPTGEGEIFVSPFSAEEGDFHQIHADLNAAQNLQQRLWSDFDISQIRLRCDWGEVDGELVLIPRLTGKRTADSYSNKVFYTNTGVTYYERERGKKRRKVFAQEKLSEEEAELLVEADEAREKSVVLMRDPSGIINRGNWTRQKEFWSMVNQRIEGYLVKQIRSRVPLQDSACENTGDI

SEQ ID NO: 233 - protein, 1368 aa, Mus musculus
  REGION 1..1368: note = MISC_FEATURE - high fidelity Cas9 polypeptide sequence
MDKKYSIGLAIGTNSVGWAVITDEYKVPSKKFKVLGNTDRHSIKKNLIGALLFDSGETAEATRLKRTARRRYTRRKNRICYLQEIFSNEMAKVDDSFFHRLEESFLVEEDKKHERHPIFGNIVDEVAYHEKYPTIYHLRKKLVDSTDKADLRLIYLALAHMIKFRGHFLIEGDLNPDNSDVDKLFIQLVQTYNQLFEENPINASGVDAKAILSARLSKSRRLENLIAQLPGEKKNGLFGNLIALSLGLTPNFKSNFDLAEDAKLQLSKDTYDDDLDNLLAQIGDQYADLFLAAKNLSDAILLSDILRVNTEITKAPLSASMIKRYDEHHQDLTLLKALVRQQLPEKYKEIFFDQSKNGYAGYIDGGASQEEFYKFIKPILEKMDGTEELLVKLNREDLLRKQRTFDNGSIPHQIHLGELHAILRRQEDFYPFLKDNREKIEKILTFRIPYYVGPLARGNSRFAWMTRKSEETITPWNFEEVVDKGASAQSFIERMTAFDKNLPNEKVLPKHSLLYEYFTVYNELTKVKYVTEGMRKPAFLSGEQKKAIVDLLFKTNRKVTVKQLKEDYFKKIECFDSVEISGVEDRFNASLGTYHDLLKIIKDKDFLDNEENEDILEDIVLTLTLFEDREMIEERLKTYAHLFDDKVMKQLKRRRYTGWGALSRKLINGIRDKQSGKTILDFLKSDGFANRNFMALIHDDSLTFKEDIQKAQVSGQGDSLHEHIANLAGSPAIKKGILQTVKVVDELVKVMGRHKPENIVIEMARENQTTQKGQKNSRERMKRIEEGIKELGSQILKEHPVENTQLQNEKLYLYYLQNGRDMYVDQELDINRLSDYDVDHIVPQSFLKDDSIDNKVLTRSDKNRGKSDNVPSEEVVKKMKNYWRQLLNAKLITQRKFDNLTKAERGGLSELDKAGFIKRQLVETRAITKHVAQILDSRMNTKYDENDKLIREVKVITLKSKLVSDFRKDFQFYKVREINNYHHAHDAYLNAVVGTALIKKYPKLESEFVYGDYKVYDVRKMIAKSEQEIGKATAKYFFYSNIMNFFKTEITLANGEIRKRPLIETNGETGEIVWDKGRDFATVRKVLSMPQVNIVKKTEVQTGGFSKESILPKRNSDKLIARKKDWDPKKYGGFDSPTVAYSVLVVAKVEKGKSKKLKSVKELLGITIMERSSFEKNPIDFLEAKGYKEVKKDLIIKLPKYSLFELENGRKRMLASAGELQKGNELALPSKYVNFLYLASHYEKLKGSPEDNEQKQLFVEQHKHYLDEIIEQISEFSKRVILADANLDKVLSAYNKHRDKPIREQAENIIHLFTLTNLGAPAAFKYFDTTIDRKRYTSTKEVLDATLIHQSITGLYETRIDLSQLGGD

SEQ ID NO: 234 - protein, 1368 aa, Streptococcus pyogenes
  REGION 1..1368: note = MISC_FEATURE - PAM-binding SpEQR Cas9 polypeptide sequence
MDKKYSIGLAIGTNSVGWAVITDEYKVPSKKFKVLGNTDRHSIKKNLIGALLFDSGETAEATRLKRTARRRYTRRKNRICYLQEIFSNEMAKVDDSFFHRLEESVLVEEDKKHERHPIFGNIVDEVAYHEKYPTIYHLRKKLVDSTDKADLRLIYLALAHMIKFRGHFLIEGDLNPDNSDVDKLFIQLVQTYNQLFEENPINASGVDAKAILSARLSKSRRLENLIAQLPGEKKNGLFGNLIALSLGLTPNFKSNFDLAEDAKLQLSKDTYDDDLDNLLAQIGDQYADLFLAAKNLSDAILLSDILRVNTEITKAPLSASMIKRYDEHHQDLTLLKALVRQQLPEKYKEIFFDQSKNGYAGYIDGGASQEEFYKFIKPILEKMDGTEELLVKLNREDLLRKQRTFDNGSIPHQIHLGELHAILRRQEDFYPFLKDNREKIEKILTFRIPYYVGPLARGNSRFAWMTRKSEETITPWNFEEVVDKGASAQSFIERMTNFDKNLPNEKVLPKHSLLYEYFTVYNELTKVKYVTEGMRKPAFLSGEQKKAIVDLLFKTNRKVTVKQLKEDYFKKIECFDSVEISGVEDRFNASLGTYHDLLKIIKDKDFLDNEENEDILEDIVLTLTLFEDREMIEERLKTYAHLFDDKVMKQLKRRRYTGWGRLSRKLINGIRDKQSGKTILDFLKSDGFANRNFMQLIHDDSLTFKEDIQKAQVSGQGDSLHEHIANLAGSPAIKKGILQTVKVVDELVKVMGRHKPENIVIEMARENQTTQKGQKNSRERMKRIEEGIKELGSQILKEHPVENTQLQNEKLYLYYLQNGRDMYVDQELDINRLSDYDVDHIVPQSFLKDDSIDNKVLTRSDKNRGKSDNVPSEEVVKKMKNYWRQLLNAKLITQRKFDNLTKAERGGLSELDKAGFIKRQLVETRQITKHVAQILDSRMNTKYDENDKLIREVKVITLKSKLVSDFRKDFQFYKVREINNYHHAHDAYLNAVVGTALIKKYPKLESEFVYGDYKVYDVRKMIAKSEQEIGKATAKYFFYSNIMNFFKTEITLANGEIRKRPLIETNGETGEIVWDKGRDFATVRKVLSMPQVNIVKKTEVQTGGFSKESILPKRNSDKLIARKKDWDPKKYGGFESPTVAYSVLVVAKVEKGKSKKLKSVKELLGITIMERSSFEKNPIDFLEAKGYKEVKKDLIIKLPKYSLFELENGRKRMLASAGELQKGNELALPSKYVNFLYLASHYEKLKGSPEDNEQKQLFVEQHKHYLDEIIEQISEFSKRVILADANLDKVLSAYNKHRDKPIREQAENIIHLFTLTNLGAPAAFKYFDTTIDRKQYRSTKEVLDATLIHQSITGLYETRIDLSQLGGD

SEQ ID NO: 235 - protein, 1368 aa, Streptococcus pyogenes
  REGION 1..1368: note = MISC_FEATURE - PAM-binding SpVQR Cas9 polypeptide sequence
MDKKYSIGLAIGTNSVGWAVITDEYKVPSKKFKVLGNTDRHSIKKNLIGALLFDSGETAEATRLKRTARRRYTRRKNRICYLQEIFSNEMAKVDDSFFHRLEESFLVEEDKKHERHPIFGNIVDEVAYHEKYPTIYHLRKKLVDSTDKADLRLIYLALAHMIKFRGHFLIEGDLNPDNSDVDKLFIQLVQTYNQLFEENPINASGVDAKAILSARLSKSRRLENLIAQLPGEKKNGLFGNLIALSLGLTPNFKSNFDLAEDAKLQLSKDTYDDDLDNLLAQIGDQYADLFLAAKNLSDAILLSDILRVNTEITKAPLSASMIKRYDEHHQDLTLLKALVRQQLPEKYKEIFFDQSKNGYAGYIDGGASQEEFYKFIKPILEKMDGTEELLVKLNREDLLRKQRTFDNGSIPHQIHLGELHAILRRQEDFYPFLKDNREKIEKILTFRIPYYVGPLARGNSRFAWMTRKSEETITPWNFEEVVDKGASAQSFIERMTNFDKNLPNEKVLPKHSLLYEYFTVYNELTKVKYVTEGMRKPAFLSGEQKKAIVDLLFKTNRKVTVKQLKEDYFKKIECFDSVEISGVEDRFNASLGTYHDLLKIIKDKDFLDNEENEDILEDIVLTLTLFEDREMIEERLKTYAHLFDDKVMKQLKRRRYTGWGRLSRKLINGIRDKQSGKTILDFLKSDGFANRNFMQLIHDDSLTFKEDIQKAQVSGQGDSLHEHIANLAGSPAIKKGILQTVKVVDELVKVMGRHKPENIVIEMARENQTTQKGQKNSRERMKRIEEGIKELGSQILKEHPVENTQLQNEKLYLYYLQNGRDMYVDQELDINRLSDYDVDHIVPQSFLKDDSIDNKVLTRSDKNRGKSDNVPSEEVVKKMKNYWRQLLNAKLITQRKFDNLTKAERGGLSELDKAGFIKRQLVETRQITKHVAQILDSRMNTKYDENDKLIREVKVITLKSKLVSDFRKDFQFYKVREINNYHHAHDAYLNAVVGTALIKKYPKLESEFVYGDYKVYDVRKMIAKSEQEIGKATAKYFFYSNIMNFFKTEITLANGEIRKRPLIETNGETGEIVWDKGRDFATVRKVLSMPQVNIVKKTEVQTGGFSKESILPKRNSDKLIARKKDWDPKKYGGFVSPTVAYSVLVVAKVEKGKSKKLKSVKELLGITIMERSSFEKNPIDFLEAKGYKEVKKDLIIKLPKYSLFELENGRKRMLASAGELQKGNELALPSKYVNFLYLASHYEKLKGSPEDNEQKQLFVEQHKHYLDEIIEQISEFSKRVILADANLDKVLSAYNKHRDKPIREQAENIIHLFTLTNLGAPAAFKYFDTTIDRKQYRSTKEVLDATLIHQSITGLYETRIDLSQLGGD

SEQ ID NO: 236 - protein, 1368 aa, Streptococcus pyogenes
  REGION 1..1368: note = MISC_FEATURE - SpVQR Cas9 polypeptide sequence
MDKKYSIGLAIGTNSVGWAVITDEYKVPSKKFKVLGNTDRHSIKKNLIGALLFDSGETAEATRLKRTARRRYTRRKNRICYLQEIFSNEMAKVDDSFFHRLEESFLVEEDKKHERHPIFGNIVDEVAYHEKYPTIYHLRKKLVDSTDKADLRLIYLALAHMIKFRGHFLIEGDLNPDNSDVDKLFIQLVQTYNQLFEENPINASGVDAKAILSARLSKSRRLENLIAQLPGEKKNGLFGNLIALSLGLTPNFKSNFDLAEDAKLQLSKDTYDDDLDNLLAQIGDQYADLFLAAKNLSDAILLSDILRVNTEITKAPLSASMIKRYDEHHQDLTLLKALVRQQLPEKYKEIFFDQSKNGYAGYIDGGASQEEFYKFIKPILEKMDGTEELLVKLNREDLLRKQRTFDNGSIPHQIHLGELHAILRRQEDFYPFLKDNREKIEKILTFRIPYYVGPLARGNSRFAWMTRKSEETITPWNFEEVVDKGASAQSFIERMTNFDKNLPNEKVLPKHSLLYEYFTVYNELTKVKYVTEGMRKPAFLSGEQKKAIVDLLFKTNRKVTVKQLKEDYFKKIECFDSVEISGVEDRFNASLGTYHDLLKIIKDKDFLDNEENEDILEDIVLTLTLFEDREMIEERLKTYAHLFDDKVMKQLKRRRYTGWGRLSRKLINGIRDKQSGKTILDFLKSDGFANRNFMQLIHDDSLTFKEDIQKAQVSGQGDSLHEHIANLAGSPAIKKGILQTVKVVDELVKVMGRHKPENIVIEMARENQTTQKGQKNSRERMKRIEEGIKELGSQILKEHPVENTQLQNEKLYLYYLQNGRDMYVDQELDINRLSDYDVDHIVPQSFLKDDSIDNKVLTRSDKNRGKSDNVPSEEVVKKMKNYWRQLLNAKLITQRKFDNLTKAERGGLSELDKAGFIKRQLVETRQITKHVAQILDSRMNTKYDENDKLIREVKVITLKSKLVSDFRKDFQFYKVREINNYHHAHDAYLNAVVGTALIKKYPKLESEFVYGDYKVYDVRKMIAKSEQEIGKATAKYFFYSNIMNFFKTEITLANGEIRKRPLIETNGETGEIVWDKGRDFATVRKVLSMPQVNIVKKTEVQTGGFSKESILPKRNSDKLIARKKDWDPKKYGGFVSPTVAYSVLVVAKVEKGKSKKLKSVKELLGITIMERSSFEKNPIDFLEAKGYKEVKKDLIIKLPKYSLFELENGRKRMLASARELQKGNELALPSKYVNFLYLASHYEKLKGSPEDNEQKQLFVEQHKHYLDEIIEQISEFSKRVILADANLDKVLSAYNKHRDKPIREQAENIIHLFTLTNLGAPAAFKYFDTTIDRKEYRSTKEVLDATLIHQSITGLYETRIDLSQLGGD

SEQ ID NO: 237 - protein, 1359 aa, Streptococcus macacae
  REGION 1..1359: note = MISC_FEATURE - SpyMacCas9 polypeptide sequence
MDKKYSIGLDIGTNSVGWAVITDDYKVPSKKFKVLGNTDRHSIKKNLIGALLFGSGETAEATRLKRTARRRYTRRKNRICYLQEIFSNEMAKVDDSFFHRLEESFLVEEDKKHERHPIFGNIVDEVAYHEKYPTIYHLRKKLADSTDKADLRLIYLALAHMIKFRGHFLIEGDLNPDNSDVDKLFIQLVQIYNQLFEENPINASRVDAKAILSARLSKSRRLENLIAQLPGEKRNGLFGNLIALSLGLTPNFKSNFDLAEDAKLQLSKDTYDDDLDNLLAQIGDQYADLFLAAKNLSDAILLSDILRVNSEITKAPLSASMIKRYDEHHQDLTLLKALVRQQLPEKYKEIFFDQSKNGYAGYIDGGASQEEFYKFIKPILEKMDGTEELLVKLNREDLLRKQRTFDNGSIPHQIHLGELHAILRRQEDFYPFLKDNREKIEKILTFRIPYYVGPLARGNSRFAWMTRKSEETITPWNFEEVVDKGASAQSFIERMTNFDKNLPNEKVLPKHSLLYEYFTVYNELTKVKYVTEGMRKPAFLSGEQKKAIVDLLFKTNRKVTVKQLKEDYFKKIECFDSVEISGVEDRFNASLGAYHDLLKIIKDKDFLDNEENEDILEDIVLTLTLFEDRGMIEERLKTYAHLFDDKVMKQLKRRRYTGWGRLSRKLINGIRDKQSGKTILDFLKSDGFANRNFMQLIHDDSLTFKEDIQKAQVSGQGHSLHEQIANLAGSPAIKKGILQTVKIVDELVKVMGHKPENIVIEMARENQTTQKGQKNSRERMKRIEEGIKELGSQILKEHPVENTQLQNEKLYLYYLQNGRDMYVDQELDINRLSDYDVDHIVPQSFIKDDSIDNKVLTRSDKNRGKSDNVPSEEVVKKMKNYWRQLLNAKLITQRKFDNLTKAERGGLSELDKAGFIKRQLVETRQITKHVAQILDSRMNTKYDENDKLIREVKVITLKSKLVSDFRKDFQFYKVREINNYHHAHDAYLNAVVGTALIKKYPKLESEFVYGDYKVYDVRKMIAKSEQEIGKATAKYFFYSNIMNFFKTEITLANGEIRKRPLIETNGETGEIVWDKGRDFATVRKVLSMPQVNIVKKTEIQTVGQNGGLFDDNPKSPLEVTPSKLVPLKKELNPKKYGGYQKPTTAYPVLLITDTKQLIPISVMNKKQFEQNPVKFLRDRGYQQVGKNDFIKLPKYTLVDIGDGIKRLWASSKEIHKGNQLVVSKKSQILLYHAHHLDSDLSNDYLQNHNQQFDVLFNEIISFSKKCKLGKEHIQKIENVYSNKKNSASIEELAESFIKLLGFTQLGATSPFNFLGVKLNQKQYKGKKDYILPCTEGTLIRQSITGLYETRVDLSKIGED

SEQ ID NO: 238 - protein, 1410 aa, synthetic construct
  REGION 1..1410: note = CP5 polypeptide sequence
  REGION 1..341: note = MISC_FEATURE - Sequence derived from Cas9
  REGION 342..362: note = MISC_FEATURE - Linker sequence
  REGION 363..1388: note = MISC_FEATURE - Sequence derived from Cas9
  REGION 1389..1410: note = MISC_FEATURE - Bipartite nuclear localization sequence
EIGKATAKYFFYSNIMNFFKTEITLANGEIRKRPLIETNGETGEIVWDKGRDFATVRKVLSMPQVNIVKKTEVQTGGFSKESILPKRNSDKLIARKKDWDPKKYGGFMQPTVAYSVLVVAKVEKGKSKKLKSVKELLGITIMERSSFEKNPIDFLEAKGYKEVKKDLIIKLPKYSLFELENGRKRMLASAKFLQKGNELALPSKYVNFLYLASHYEKLKGSPEDNEQKQLFVEQHKHYLDEIIEQISEFSKRVILADANLDKVLSAYNKHRDKPIREQAENIIHLFTLTNLGAPRAFKYFDTTIARKEYRSTKEVLDATLIHQSITGLYETRIDLSQLGGDGGSGGSGGSGGSGGSGGSGGMDKKYSIGLAIGTNSVGWAVITDEYKVPSKKFKVLGNTDRHSIKKNLIGALLFDSGETAEATRLKRTARRRYTRRKNRICYLQEIFSNEMAKVDDSFFHRLEESFLVEEDKKHERHPIFGNIVDEVAYHEKYPTIYHLRKKLVDSTDKADLRLIYLALAHMIKFRGHFLIEGDLNPDNSDVDKLFIQLVQTYNQLFEENPINASGVDAKAILSARLSKSRRLENLIAQLPGEKKNGLFGNLIALSLGLTPNFKSNFDLAEDAKLQLSKDTYDDDLDNLLAQIGDQYADLFLAAKNLSDAILLSDILRVNTEITKAPLSASMIKRYDEHHQDLTLLKALVRQQLPEKYKEIFFDQSKNGYAGYIDGGASQEEFYKFIKPILEKMDGTEELLVKLNREDLLRKQRTFDNGSIPHQIHLGELHAILRRQEDFYPFLKDNREKIEKILTFRIPYYVGPLARGNSRFAWMTRKSEETITPWNFEEVVDKGASAQSFIERMTNFDKNLPNEKVLPKHSLLYEYFTVYNELTKVKYVTEGMRKPAFLSGEQKKAIVDLLFKTNRKVTVKQLKEDYFKKIECFDSVEISGVEDRFNASLGTYHDLLKIIKDKDFLDNEENEDILEDIVLTLTLFEDREMIEERLKTYAHLFDDKVMKQLKRRRYTGWGRLSRKLINGIRDKQSGKTILDFLKSDGFANRNFMQLIHDDSLTFKEDIQKAQVSGQGDSLHEHIANLAGSPAIKKGILQTVKVVDELVKVMGRHKPENIVIEMARENQTTQKGQKNSRERMKRIEEGIKELGSQILKEHPVENTQLQNEKLYLYYLQNGRDMYVDQELDINRLSDYDVDHIVPQSFLKDDSIDNKVLTRSDKNRGKSDNVPSEEVVKKMKNYWRQLLNAKLITQRKFDNLTKAERGGLSELDKAGFIKRQLVETRQITKHVAQILDSRMNTKYDENDKLIREVKVITLKSKLVSDFRKDFQFYKVREINNYHHAHDAYLNAVVGTALIKKYPKLESEFVYGDYKVYDVRKMIAKSEQEGADKRTADGSEFESPKKKRKV

SEQ ID NO: 239 - protein, 1302 aa, synthetic construct
  REGION 1..1302: note = Cas12c1 polypeptide sequence
MQTKKTHLHLISAKASRKYRRTIACLSDTAKKDLERRKQSGAADPAQELSCLKTIKFKLEVPEGSKLPSFDRISQIYNALETIEKGSLSYLLFALILSGFRIFPNSSAAKTFASSSCYKNDQFASQIKEIFGEMVKNFIPSELESILKKGRRKNNKDWTEENIKRVLNSEFGRKNSEGSSALFDSFLSKFSQELFRKFDSWNEVNKKYLEAAELLDSMLASYGPFDSVCKMIGDSDSRNSLPDKSTIAFTNNAEITVDIESSVMPYMAIAALLREYRQSKSKAAPVAYVQSHLTTTNGNGLSWFFKFGLDLIRKAPVSSKQSTSDGSKSLQELFSVPDDKLDGLKFIKEACEALPEASLLCGEKGELLGYQDFRTSFAGHIDSWVANYVNRLFELIELVNQLPESIKLPSILTQKNHNLVASLGLQEAEVSHSLELFEGLVKNVRQTLKKLAGIDISSSPNEQDIKEFYAFSDVLNRLGSIRNQIENAVQTAKKDKIDLESAIEWKEWKKLKKLPKLNGLGGGVPKQQELLDKALESVKQIRHYQRIDFERVIQWAVNEHCLETVPKFLVDAEKKKINKESSTDFAAKENAVRFLLEGIGAAARGKTDSVSKAAYNWFVVNNFLAKKDLNRYFINCQGCIYKPPYSKRRSLAFALRSDNKDTIEVVWEKFETFYKEISKEIEKFNIFSQEFQTFLHLENLRMKLLLRRIQKPIPAEIAFFSLPQEYYDSLPPNVAFLALNQEITPSEYITQFNLYSSFLNGNLILLRRSRSYLRAKFSWVGNSKLIYAAKEARLWKIPNAYWKSDEWKMILDSNVLVFDKAGNVLPAPTLKKVCEREGDLRLFYPLLRQLPHDWCYRNPFVKSVGREKNVIEVNKEGEPKVASALPGSLFRLIGPAPFKSLLDDCFFNPLDKDLRECMLIVDQEISQKVEAQKVEASLESCTYSIAVPIRYHLEEPKVSNQFENVLAIDQGEAGLAYAVFSLKSIGEAETKPIAVGTIRIPSIRRLIHSVSTYRKKKQRLQNFKQNYDSTAFIMRENVTGDVCAKIVGLMKEFNAFPVLEYDVKNLESGSRQLSAVYKAVNSHFLYFKEPGRDALRKQLWYGGDSWTIDGIEIVTRERKEDGKEGVEKIVPLKVFPGRSVSARFTSKTCSCCGRNVFDWLFTEKKAKTNKKFNVNSKGELTTADGVIQLFEADRSKGPKFYARRKERTPLTKPIAKGSYSLEEIERRVRTNLRRAPKSKQSRDTSQSQYFCVYKDCALHFSGMQADENAAINIGRRFLTALRKNRRSDFPSNVKISDRLLDN

SEQ ID NO: 240 - protein, 1218 aa, synthetic construct
  REGION 1..1218: note = Cas12c2 polypeptide sequence
MTKHSIPLHAFRNSGADARKWKGRIALLAKRGKETMRTLQFPLEMSEPEAAAINTTPFAVAYNAIEGTGKGTLFDYWAKLHLAGFRFFPSGGAATIFRQQAVFEDASWNAAFCQQSGKDWPWLVPSKLYERFTKAPREVAKKDGSKKSIEFTQENVANESHVSLVGASITDKTPEDQKEFFLKMAGALAEKFDSWKSANEDRIVAMKVIDEFLKSEGLHLPSLENIAVKCSVETKPDNATVAWHDAPMSGVQNLAIGVFATCASRIDNIYDLNGGKLSKLIQESATTPNVTALSWLFGKGLEYFRTTDIDTIMQDFNIPASAKESIKPLVESAQAIPTMTVLGKKNYAPFRPNFGGKIDSWIANYASRLMLLNDILEQIEPGFELPQALLDNETLMSGIDMTGDELKELIEAVYAWVDAAKQGLATLLGRGGNVDDAVQTFEQFSAMMDTLNGTLNTISARYVRAVEMAGKDEARLEKLIECKFDIPKWCKSVPKLVGISGGLPKVEEEIKVMNAAFKDVRARMFVRFEEIAAYVASKGAGMDVYDALEKRELEQIKKLKSAVPERAHIQAYRAVLHRIGRAVQNCSEKTKQLFSSKVIEMGVFKNPSHLNNFIFNQKGAIYRSPFDRSRHAPYQLHADKLLKNDWLELLAEISATLMASESTEQMEDALRLERTRLQLQLSGLPDWEYPASLAKPDIEVEIQTALKMQLAKDTVTSDVLQRAFNLYSSVLSGLTFKLLRRSFSLKMRFSVADTTQLIYVPKVCDWAIPKQYLQAEGEIGIAARVVTESSPAKMVTEVEMKEPKALGHFMQQAPHDWYFDASLGGTQVAGRIVEKGKEVGKERKLVGYRMRGNSAYKTVLDKSLVGNTELSQCSMIIEIPYTQTVDADFRAQVQAGLPKVSINLPVKETITASNKDEQMLFDRFVAIDLGERGLGYAVFDAKTLELQESGHRPIKAITNLLNRTHHYEQRPNQRQKFQAKFNVNLSELRENTVGDVCHQINRICAYYNAFPVLEYMVPDRLDKQLKSVYESVTNRYIWSSTDAHKSARVQFWLGGETWEHPYLKSAKDKKPLVLSPGRGASGKGTSQTCSCCGRNPFDLIKDMKPRAKIAVVDGKAKLENSELKLFERNLESKDDMLARRHRNERAGMEQPLTPGNYTVDEIKALLRANLRRAPKNRRTKDTTVSEYHCVFSDCGKTMHADENAAVNIGGKFIADIEK

SEQ ID NO: 241 - protein, 1252 aa, Oleiphilus sp.
  REGION 1..1252: note = MISC_FEATURE - OspCas12c polypeptide sequence
MTKLRHRQKKLTHDWAGSKKREVLGSNGKLQNPLLMPVKKGQVTEFRKAFSAYARATKGEMTDGRKNMFTHSFEPFKTKPSLHQCELADKAYQSLHSYLPGSLAHFLLSAHALGFRIFSKSGEATAFQASSKIEAYESKLASELACVDLSIQNLTISTLFNALTTSVRGKGEETSADPLIARFYTLLTGKPLSRDTQGPERDLAEVISRKIASSFGTWKEMTANPLQSLQFFEEELHALDANVSLSPAFDVLIKMNDLQGDLKNRTIVFDPDAPVFEYNAEDPADIIIKLTARYAKEAVIKNQNVGNYVKNAITTTNANGLGWLLNKGLSLLPVSTDDELLEFIGVERSHPSCHALIELIAQLEAPELFEKNVFSDTRSEVQGMIDSAVSNHIARLSSSRNSLSMDSEELERLIKSFQIHTPHCSLFIGAQSLSQQLESLPEALQSGVNSADILLGSTQYMLTNSLVEESIATYQRTLNRINYLSGVAGQINGAIKRKAIDGEKIHLPAAWSELISLPFIGQPVIDVESDLAHLKNQYQTLSNEFDTLISALQKNFDLNFNKALLNRTQHFEAMCRSTKKNALSKPEIVSYRDLLARLTSCLYRGSLVLRRAGIEVLKKHKIFESNSELREHVHERKHFVFVSPLDRKAKKLLRLTDSRPDLLHVIDEILQHDNLENKDRESLWLVRSGYLLAGLPDQLSSSFINLPIITQKGDRRLIDLIQYDQINRDAFVMLVTSAFKSNLSGLQYRANKQSFVVTRTLSPYLGSKLVYVPKDKDWLVPSQMFEGRFADILQSDYMVWKDAGRLCVIDTAKHLSNIKKSVFSSEEVLAFLRELPHRTFIQTEVRGLGVNVDGIAFNNGDIPSLKTFSNCVQVKVSRTNTSLVQTLNRWFEGGKVSPPSIQFERAYYKKDDQIHEDAAKRKIRFQMPATELVHASDDAGWTPSYLLGIDPGEYGMGLSLVSINNGEVLDSGFIHINSLINFASKKSNHQTKVVPRQQYKSPYANYLEQSKDSAAGDIAHILDRLIYKLNALPVFEALSGNSQSAADQVWTKVLSFYTWGDNDAQNSIRKQHWFGASHWDIKGMLRQPPTEKKPKPYIAFPGSQVSSYGNSQRCSCCGRNPIEQLREMAKDTSIKELKIRNSEIQLFDGTIKLFNPDPSTVIERRRHNLGPSRIPVADRTFKNISPSSLEFKELITIVSRSIRHSPEFIAKKRGIGSEYFCAYSDCNSSLNSEANAAANVAQKFQKQLFFEL

SEQ ID NO: 242 - protein, 767 aa, synthetic construct
  REGION 1..767: note = Cas12g1 polypeptide sequence
MAQASSTPAVSPRPRPRYREERTLVRKLLPRPGQSKQEFRENVKKLRKAFLQFNADVSGVCQWAIQFRPRYGKPAEPTETFWKFFLEPETSLPPNDSRSPEFRRLQAFEAAAGINGAAALDDPAFTNELRDSILAVASRPKTKEAQRLFSRLKDYQPAHRMILAKVAAEWIESRYRRAHQNWERNYEEWKKEKQEWEQNHPELTPEIREAFNQIFQQLEVKEKRVRICPAARLLQNKDNCQYAGKNKHSVLCNQFNEFKKNHLQGKAIKFFYKDAEKYLRCGLQSLKPNVQGPFREDWNKYLRYMNLKEETLRGKNGGRLPHCKNLGQECEFNPHTALCKQYQQQLSSRPDLVQHDELYRKWRREYWREPRKPVFRYPSVKRHSIAKIFGENYFQADFKNSVVGLRLDSMPAGQYLEFAFAPWPRNYRPQPGETEISSVHLHFVGTRPRIGFRFRVPHKRSRFDCTQEELDELRSRTFPRKAQDQKFLEAARKRLLETFPGNAEQELRLLAVDLGTDSARAAFFIGKTFQQAFPLKIVKIEKLYEQWPNQKQAGDRRDASSKQPRPGLSRDHVGRHLQKMRAQASEIAQKRQELTGTPAPETTTDQAAKKATLQPFDLRGLTVHTARMIRDWARLNARQIIQLAEENQVDLIVLESLRGFRPPGYENLDQEKKRRVAFFAHGRIRRKVTEKAVERGMRVVTVPYLASSKVCAECRKKQKDNKQWEKNKKRGLFKCEGCGSQAQVDENAARVLGRVFWGEIELPTAIP

SEQ ID NO: 243 - protein, 870 aa, synthetic construct
  REGION 1..870: note = Cas12h1 polypeptide sequence
MKVHEIPRSQLLKIKQYEGSFVEWYRDLQEDRKKFASLLFRWAAFGYAAREDDGATYISPSQALLERRLLLGDAEDVAIKFLDVLFKGGAPSSSCYSLFYEDFALRDKAKYSGAKREFIEGLATMPLDKIIERIRQDEQLSKIPAEEWLILGAEYSPEEIWEQVAPRIVNVDRSLGKQLRERLGIKCRRPHDAGYCKILMEVVARQLRSHNETYHEYLNQTHEMKTKVANNLTNEFDLVCEFAEVLEEKNYGLGWYVLWQGVKQALKEQKKPTKIQIAVDQLRQPKFAGLLTAKWRALKGAYDTWKLKKRLEKRKAFPYMPNWDNDYQIPVGLTGLGVFTLEVKRTEVVVDLKEHGKLFCSHSHYFGDLTAEKHPSRYHLKFRHKLKLRKRDSRVEPTIGPWIEAALREITIQKKPNGVFYLGLPYALSHGIDNFQIAKRFFSAAKPDKEVINGLPSEMVVGAADLNLSNIVAPVKARIGKGLEGPLHALDYGYGELIDGPKILTPDGPRCGELISLKRDIVEIKSAIKEFKACQREGLTMSEETTTWLSEVESPSDSPRCMIQSRIADTSRRLNSFKYQMNKEGYQDLAEALRLLDAMDSYNSLLESYQRMHLSPGEQSPKEAKFDTKRASFRDLLRRRVAHTIVEYFDDCDIVFFEDLDGPSDSDSRNNALVKLLSPRTLLLYIRQALEKRGIGMVEVAKDGTSQNNPISGHVGWRNKQNKSEIYFYEDKELLVMDADEVGAMNILCRGLNHSVCPYSFVTKAPEKKNDEKKEGDYGKRVKRFLKDRYGSSNVRFLVASMGFVTVTTKRPKDALVGKRLYYHGGELVTHDLHNRMKDEIKYLVEKEVLARRVSLSDSTIKSYKSFAHV

SEQ ID NO: 244 - protein, 1093 aa, synthetic construct
  REGION 1..1093: note = Cas12i1 polypeptide sequence
MSNKEKNASETRKAYTTKMIPRSHDRMKLLGNFMDYLMDGTPIFFELWNQFGGGIDRDIISGTANKDKISDDLLLAVNWFKVMPINSKPQGVSPSNLANLFQQYSGSEPDIQAQEYFASNFDTEKHQWKDMRVEYERLLAELQLSRSDMHHDLKLMYKEKCIGLSLSTAHYITSVMFGTGAKNNRQTKHQFYSKVIQLLEESTQINSVEQLASIILKAGDCDSYRKLRIRCSRKGATPSILKIVQDYELGTNHDDEVNVPSLIANLKEKLGRFEYECEWKCMEKIKAFLASKVGPYYLGSYSAMLENALSPIKGMTTKNCKFVLKQIDAKNDIKYENEPFGKIVEGFFDSPYFESDTNVKWVLHPHHIGESNIKTLWEDLNAIHSKYEEDIASLSEDKKEKRIKVYQGDVCQTINTYCEEVGKEAKTPLVQLLRYLYSRKDDIAVDKIIDGITFLSKKHKVEKQKINPVIQKYPSFNFGNNSKLLGKIISPKDKLKHNLKCNRNQVDNYIWIEIKVLNTKTMRWEKHHYALSSTRFLEEVYYPATSENPPDALAARFRTKTNGYEGKPALSAEQIEQIRSAPVGLRKVKKRQMRLEAARQQNLLPRYTWGKDFNINICKRGNNFEVTLATKVKKKKEKNYKVVLGYDANIVRKNTYAAIEAHANGDGVIDYNDLPVKPIESGFVTVESQVRDKSYDQLSYNGVKLLYCKPHVESRRSFLEKYRNGTMKDNRGNNIQIDFMKDFEAIADDETSLYYFNMKYCKLLQSSIRNHSSQAKEYREEIFELLRDGKLSVLKLSSLSNLSFVMFKVAKSLIGTYFGHLLKKPKNSKSDVKAPPITDEDKQKADPEMFALRLALEEKRLNKVKSKKEVIANKIVAKALELRDKYGPVLIKGENISDTTKKGKKSSTNSFLMDWLARGVANKVKEMVMMHQGLEFVEVNPNFTSHQDPFVHKNPENTFRARYSRCTPSELTEKNRKEILSFLSDKPSKRPTNAYYNEGAMAFLATYGLKKNDVLGVSLEKFKQIMANILHQRSEDQLLFPSRGGMFYLATYKLDADATSVNWNGKQFWVCNADLVAAYNVGLVDIQKDFKKK

SEQ ID NO: 245 - protein, 1054 aa, synthetic construct
  REGION 1..1054: note = Cas12i2 polypeptide sequence
MSSAIKSYKSVLRPNERKNQLLKSTIQCLEDGSAFFFKMLQGLFGGITPEIVRFSTEQEKQQQDIALWCAVNWFRPVSQDSLTHTIASDNLVEKFEEYYGGTASDAIKQYFSASIGESYYWNDCRQQYYDLCRELGVEVSDLTHDLEILCREKCLAVATESNQNNSIISVLFGTGEKEDRSVKLRITKKILEAISNLKEIPKNVAPIQEIILNVAKATKETFRQVYAGNLGAPSTLEKFIAKDGQKEFDLKKLQTDLKKVIRGKSKERDWCCQEELRSYVEQNTIQYDLWAWGEMFNKAHTALKIKSTRNYNFAKQRLEQFKEIQSLNNLLVVKKLNDFFDSEFFSGEETYTICVHHLGGKDLSKLYKAWEDDPADPENAIVVLCDDLKNNFKKEPIRNILRYIFTIRQECSAQDILAAAKYNQQLDRYKSQKANPSVLGNQGFTWTNAVILPEKAQRNDRPNSLDLRIWLYLKLRHPDGRWKKHHIPFYDTRFFQEIYAAGNSPVDTCQFRTPRFGYHLPKLTDQTAIRVNKKHVKAAKTEARIRLAIQQGTLPVSNLKITEISATINSKGQVRIPVKFDVGRQKGTLQIGDRFCGYDQNQTASHAYSLWEVVKEGQYHKELGCFVRFISSGDIVSITENRGNQFDQLSYEGLAYPQYADWRKKASKFVSLWQITKKNKKKEIVTVEAKEKFDAICKYQPRLYKFNKEYAYLLRDIVRGKSLVELQQIRQEIFRFIEQDCGVTRLGSLSLSTLETVKAVKGIIYSYFSTALNASKNNPISDEQRKEFDPELFALLEKLELIRTRKKKQKVERIANSLIQTCLENNIKFIRGEGDLSTTNNATKKKANSRSMDWLARGVFNKIRQLAPMHNITLFGCGSLYTSHQDPLVHRNPDKAMKCRWAAIPVKDIGDWVLRKLSQNLRAKNIGTGEYYHQGVKEFLSHYELQDLEEELLKWRSDRKSNIPCWVLQNRLAEKLGNKEAVVYIPVRGGRIYFATHKVATGAVSIVFDQKQVWVCNADHVAAANIALTVKGIGEQSSDEENPDGSRIKLQLTS

SEQ ID NO: 246 - protein, 4 aa, synthetic construct
  REGION 1..4: note = synthetic peptide sequence
GGGS

SEQ ID NO: 247 - protein, 5 aa, synthetic construct
  REGION 1..5: note = synthetic peptide sequence
GGGGS

SEQ ID NO: 248 - protein, 5 aa, synthetic construct
  REGION 1..5: note = synthetic peptide sequence
EAAAK

SEQ ID NO: 249 - protein, 16 aa, synthetic construct
  REGION 1..16: note = synthetic peptide sequence
SGSETPGTSESATPES

SEQ ID NO: 250 - protein, 6 aa, synthetic construct
  REGION 1..6: note = linker peptide sequence
GGSGGS

SEQ ID NO: 251 - protein, 20 aa, synthetic construct
  REGION 1..20: note = synthetic peptide sequence
GSSGSETPGTSESATPESSG

SEQ ID NO: 252 - DNA, 18 bp, synthetic construct
  misc_feature 1..18: note = synthetic oligonucleotide sequence
  source 1..18: mol_type = other DNA
ggaggctctggaggaagc

SEQ ID NO: 253 - DNA, 60 bp, synthetic construct
  misc_feature 1..60: note = synthetic oligonucleotide sequence
  source 1..60: mol_type = other DNA
ggctcttctggatctgaaacacctggcacaagcgagagcgccacccctgagagctctggc

SEQ ID NO: 254 - protein, 1129 aa, Alicyclobacillus acidiphilus
  REGION 1..1129: note = MISC_FEATURE - AacCas12b polypeptide sequence
MAVKSMKVKLRLDNMPEIRAGLWKLHTEVNAGVRYYTEWLSLLRQENLYRRSPNGDGEQECYKTAEECKAELLERLRARQVENGHCGPAGSDDELLQLARQLYELLVPQAIGAKGDAQQIARKFLSPLADKDAVGGLGIAKAGNKPRWVRMREAGEPGWEEEKAKAEARKSTDRTADVLRALADFGLKPLMRVYTDSDMSSVQWKPLRKGQAVRTWDRDMFQQAIERMMSWESWNQRVGEAYAKLVEQKSRFEQKNFVGQEHLVQLVNQLQQDMKEASHGLESKEQTAHYLTGRALRGSDKVFEKWEKLDPDAPFDLYDTEIKNVQRRNTRRFGSHDLFAKLAEPKYQALWREDASFLTRYAVYNSIVRKLNHAKMFATFTLPDATAHPIWTRFDKLGGNLHQYTFLFNEFGEGRHAIRFQKLLTVEDGVAKEVDDVTVPISMSAQLDDLLPRDPHELVALYFQDYGAEQHLAGEFGGAKIQYRRDQLNHLHARRGARDVYLNLSVRVQSQSEARGERRPPYAAVFRLVGDNHRAFVHFDKLSDYLAEHPDDGKLGSEGLLSGLRVMSVDLGLRTSASISVFRVARKDELKPNSEGRVPFCFPIEGNENLVAVHERSQLLKLPGETESKDLRAIREERQRTLRQLRTQLAYLRLLVRCGSEDVGRRERSWAKLIEQPMDANQMTPDWREAFEDELQKLKSLYGICGDREWTEAVYESVRRVWRHMGKQVRDWRKDVRSGERPKIRGYQKDVVGGNSIEQIEYLERQYKFLKSWSFFGKVSGQVIRAEKGSRFAITLREHIDHAKEDRLKKLADRIIMEALGYVYALDDERGKGKWVAKYPPCQLILLEELSEYQFNNDRPPSENNQLMQWSHRGVFQELLNQAQVHDLLVGTMYAAFSSRFDARTGAPGIRCRRVPARCAREQNPEPFPWWLNKFVAEHKLDGCPLRADDLIPTGEGEFFVSPFSAEEGDFHQIHADLNAAQNLQRRLWSDFDISQIRLRCDWGEVDGEPVLIPRTTGKRTADSYGNKVFYTKTGVTYYERERGKKRRKVFAQEELSEEEAELLVEADEAREKSVVLMRDPSGIINRGDWTRQKEFWSMVNQRIEGYLVKQIRSRVRLQESACENTGDI

SEQ ID NO: 255 - protein, 1140 aa, Bacillus hisashii
  REGION 1..1140: note = MISC_FEATURE - BhCas12b polypeptide sequence
MAPKKKRKVGIHGVPAAATRSFILKIEPNEEVKKGLWKTHEVLNHGIAYYMNILKLIRQEAIYEHHEQDPKNPKKVSKAEIQAELWDFVLKMQKCNSFTHEVDKDEVFNILRELYEELVPSSVEKKGEANQLSNKFLYPLVDPNSQSGKGTASSGRKPRWYNLKIAGDPSWEEEKKKWEEDKKKDPLAKILGKLAEYGLIPLFIPYTDSNEPIVKEIKWMEKSRNQSVRRLDKDMFIQALERFLSWESWNLKVKEEYEKVEKEYKTLEERIKEDIQALKALEQYEKERQEQLLRDTLNTNEYRLSKRGLRGWREIIQKWLKMDENEPSEKYLEVFKDYQRKHPREAGDYSVYEFLSKKENHFIWRNHPEYPYLYATFCEIDKKKKDAKQQATFTLADPINHPLWVRFEERSGSNLNKYRILTEQLHTEKLKKKLTVQLDRLIYPTESGGWEEKGKVDIVLLPSRQFYNQIFLDIEEKGKHAFTYKDESIKFPLKGTLGGARVQFDRDHLRRYPHKVESGNVGRIYFNMTVNIEPTESPVSKSLKIHRDDFPKVVNFKPKELTEWIKDSKGKKLKSGIESLEIGLRVMSIDLGQRQAAAASIFEVVDQKPDIEGKLFFPIKGTELYAVHRASFNIKLPGETLVKSREVLRKAREDNLKLMNQKLNFLRNVLHFQQFEDITEREKRVTKWISRQENSDVPLVYQDELIQIRELMYKPYKDWVAFLKQLHKRLEVEIGKEVKHWRKSLSDGRKGLYGISLKNIDEIDRTRKFLLRWSLRPTEPGEVRRLEPGQRFAIDQLNHLNALKEDRLKKMANTIIMHALGYCYDVRKKKWQAKNPACQIILFEDLSNYNPYEERSRFENSKLMKWSRREIPRQVALQGEIYGLQVGEVGAQFSSRFHAKTGSPGIRCSVVTKEKLQDNRFFKNLQREGRLTLDKIAVLKEGDLYPDKGGEKFISLSKDRKCVTTHADINAAQNLQKRFWTRTHGFYKVYCKAYQVDGQTVYIPESKDQKQKIIEEFGEGYFILKDGVYEWVNAGKLKIKKGSSKQSSSELVDSDILKDSFDLASELKGEKLMLYRDPSGNVFPSDKWMAAGVFFGKLERILISKLTNQYSISTIEDDSSKQSMKRPAATKKAGQAKKKK

SEQ ID NO: 256 - protein, 1108 aa, Bacillus thermoamylovorans
  REGION 1..1108: note = MISC_FEATURE - BTCas12b polypeptide sequence
MATRSFILKIEPNEEVKKGLWKTHEVLNHGIAYYMNILKLIRQEAIYEHHEQDPKNPKKVSKAEIQAELWDFVLKMQKCNSFTHEVDKDVVFNILRELYEELVPSSVEKKGEANQLSNKFLYPLVDPNSQSGKGTASSGRKPRWYNLKIAGDPSWEEEKKKWEEDKKKDPLAKILGKLAEYGLIPLFIPFTDSNEPIVKEIKWMEKSRNQSVRRLDKDMFIQALERFLSWESWNLKVKEEYEKVEKEHKTLEERIKEDIQAFKSLEQYEKERQEQLLRDTLNTNEYRLSKRGLRGWREIIQKWLKMDENEPSEKYLEVFKDYQRKHPREAGDYSVYEFLSKKENHFIWRNHPEYPYLYATFCEIDKKKKDAKQQATFTLADPINHPLWVRFEERSGSNLNKYRILTEQLHTEKLKKKLTVQLDRLIYPTESGGWEEKGKVDIVLLPSRQFYNQIFLDIEEKGKHAFTYKDESIKFPLKGTLGGARVQFDRDHLRRYPHKVESGNVGRIYFNMTVNIEPTESPVSKSLKIHRDDFPKFVNFKPKELTEWIKDSKGKKLKSGIESLEIGLRVMSIDLGQRQAAAASIFEVVDQKPDIEGKLFFPIKGTELYAVHRASFNIKLPGETLVKSREVLRKAREDNLKLMNQKLNFLRNVLHFQQFEDITEREKRVTKWISRQENSDVPLVYQDELIQIRELMYKPYKDWVAFLKQLHKRLEVEIGKEVKHWRKSLSDGRKGLYGISLKNIDEIDRTRKFLLRWSLRPTEPGEVRRLEPGQRFAIDQLNHLNALKEDRLKKMANTIIMHALGYCYDVRKKKWQAKNPACQIILFEDLSNYNPYEERSRFENSKLMKWSRREIPRQVALQGEIYGLQVGEVGAQFSSRFHAKTGSPGIRCSVVTKEKLQDNRFFKNLQREGRLTLDKIAVLKEGDLYPDKGGEKFISLSKDRKLVTTHADINAAQNLQKRFWTRTHGFYKVYCKAYQVDGQTVYIPESKDQKQKIIEEFGEGYFILKDGVYEWGNAGKLKIKKGSSKQSSSELVDSDILKDSFDLASELKGEKLMLYRDPSGNVFPSDKWMAAGVFFGKLERILISKLTNQYSISTIEDDSSKQSM

SEQ ID NO: 257 - protein, 1112 aa, Bacillus sp.
  REGION 1..1112: note = MISC_FEATURE - BvCas12b (Bacillus sp. V3-13) polypeptide sequence
MAIRSIKLKMKTNSGTDSIYLRKALWRTHQLINEGIAYYMNLLTLYRQEAIGDKTKEAYQAELINIIRNQQRNNGSSEEHGSDQEILALLRQLYELIIPSSIGESGDANQLGNKFLYPLVDPNSQSGKGTSNAGRKPRWKRLKEEGNPDWELEKKKDEERKAKDPTVKIFDNLNKYGLLPLFPLFTNIQKDIEWLPLGKRQSVRKWDKDMFIQAIERLLSWESWNRRVADEYKQLKEKTESYYKEHLTGGEEWIEKIRKFEKERNMELEKNAFAPNDGYFITSRQIRGWDRVYEKWSKLPESASPEELWKVVAEQQNKMSEGFGDPKVFSFLANRENRDIWRGHSERIYHIAAYNGLQKKLSRTKEQATFTLPDAIEHPLWIRYESPGGTNLNLFKLEEKQKKNYYVTLSKIIWPSEEKWIEKENIEIPLAPSIQFNRQIKLKQHVKGKQEISFSDYSSRISLDGVLGGSRIQFNRKYIKNHKELLGEGDIGPVFFNLVVDVAPLQETRNGRLQSPIGKALKVISSDFSKVIDYKPKELMDWMNTGSASNSFGVASLLEGMRVMSIDMGQRTSASVSIFEVVKELPKDQEQKLFYSINDTELFAIHKRSFLLNLPGEVVTKNNKQQRQERRKKRQFVRSQIRMLANVLRLETKKTPDERKKAIHKLMEIVQSYDSWTASQKEVWEKELNLLTNMAAFNDEIWKESLVELHHRIEPYVGQIVSKWRKGLSEGRKNLAGISMWNIDELEDTRRLLISWSKRSRTPGEANRIETDEPFGSSLLQHIQNVKDDRLKQMANLIIMTALGFKYDKEEKDRYKRWKETYPACQIILFENLNRYLFNLDRSRRENSRLMKWAHRSIPRTVSMQGEMFGLQVGDVRSEYSSRFHAKTGAPGIRCHALTEEDLKAGSNTLKRLIEDGFINESELAYLKKGDIIPSQGGELFVTLSKRYKKDSDNNELTVIHADINAAQNLQKRFWQQNSEVYRVPCQLARMGEDKLYIPKSQTETIKKYFGKGSFVKNNTEQEVYKWEKSEKMKIKTDTTFDLQDLDGFEDISKTIELAQEQQKKYLTMFRDPSGYFFNNETWRPQKEYWSIVNNIIKSCLKKKILSNKVEL

SEQ ID NO: 258 - DNA, 47 bp, synthetic construct
  misc_feature 1..47: note = 5'UTR oligonucleotide sequence
  source 1..47: mol_type = other DNA
gggaaataagagagaaaagaagagtaagaagaaatataagagccacc

SEQ ID NO: 259 - DNA, 101 bp, synthetic construct
  misc_feature 1..101: note = 3'UTR (TriLink standard UTR)polynucleotide sequence
  source 1..101: mol_type = other DNA
gctggagcctcggtggccatgcttcttgccccttgggcctccccccagcccctcctccccttcctgcacccgtacccccgtggtctttgaataaagtctga

SEQ ID NO: 260 - DNA, 3420 bp, Bacillus hisashii
  misc_feature 1..3420: note = bhCas12b (V4) polynucleotide sequence
  source 1..3420: mol_type = genomic DNA
atggccccaaagaagaagcggaaggtcggtatccacggagtcccagcagccgccaccagatccttcatcctgaagatcgagcccaacgaggaagtgaagaaaggcctctggaaaacccacgaggtgctgaaccacggaatcgcctactacatgaatatcctgaagctgatccggcaagaggccatctacgagcaccacgagcaggaccccaagaatcccaagaaggtgtccaaggccgagatccaggccgagctgtgggatttcgtgctgaagatgcagaagtgcaacagcttcacacacgaggtggacaaggacgaggtgttcaacatcctgagagagctgtacgaggaactggtgcccagcagcgtggaaaagaagggcgaagccaaccagctgagcaacaagtttctgtaccctctggtggaccccaacagccagtctggaaagggaacagccagcagcggcagaaagcccagatggtacaacctgaagattgccggcgatccctcctgggaagaagagaagaagaagtgggaagaagataagaaaaaggacccgctggccaagatcctgggcaagctggctgagtacggactgatccctctgttcatcccctacaccgacagcaacgagcccatcgtgaaagaaatcaagtggatggaaaagtcccggaaccagagcgtgcggcggctggataaggacatgttcattcaggccctggaacggttcctgagctgggagagctggaacctgaaagtgaaagaggaatacgagaaggtcgagaaagagtacaagaccctggaagagaggatcaaagaggacatccaggctctgaaggctctggaacagtatgagaaagagcggcaagaacagctgctgcgggacaccctgaacaccaacgagtaccggctgagcaagagaggccttagaggctggcgggaaatcatccagaaatggctgaaaatggacgagaacgagccctccgagaagtacctggaagtgttcaaggactaccagcggaagcaccctagagaggccggcgattacagcgtgtacgagttcctgtccaagaaagagaaccacttcatctggcggaatcaccctgagtacccctacctgtacgccaccttctgcgagatcgacaagaaaaagaaggacgccaagcagcaggccaccttcacactggccgatcctatcaatcaccctctgtgggtccgattcgaggaaagaagcggcagcaacctgaacaagtacagaatcctgaccgagcagctgcacaccgagaagctgaagaaaaagctgacagtgcagctggaccggctgatctaccctacagaatctggcggctgggaagagaagggcaaagtggacattgtgctgctgcccagccggcagttctacaaccagatcttcctggacatcgaggaaaagggcaagcacgccttcacctacaaggatgagagcatcaagttccctctgaagggcacactcggcggagccagagtgcagttcgacagagatcacctgagaagataccctcacaaggtggaaagcggcaacgtgggcagaatctacttcaacatgaccgtgaacatcgagcctacagagtccccagtgtccaagtctctgaagatccaccgggacgacttccccaaggtggtcaacttcaagcccaaagaactgaccgagtggatcaaggacagcaagggcaagaaactgaagtccggcatcgagtccctggaaatcggcctgagagtgatgagcatcgacctgggacagagacaggccgctgccgcctctattttcgaggtggtggatcagaagcccgacatcgaaggcaagctgtttttcccaatcaagggcaccgagctgtatgccgtgcacagagccagcttcaacatcaagctgcccggcgagacactggtcaagagcagagaagtgctgcggaaggccagagaggacaatctgaaactgatgaaccagaagctcaacttcctgcggaacgtgctgcacttccagcagttcgaggacatcaccgagagagagaagcgggtcaccaagtggatcagcagacaagagaacagcgacgtgcccctggtgtaccaggatgagctgatccagatccgcgagctgatgtacaagccttacaaggactgggtcgccttcctgaagcagctccacaagagactggaagtcgagatcggcaaagaagtgaagcactggcggaagtccctgagcgacggaagaaagggcctgtacggcatctccctgaagaacatcgacgagatcgatcggacccggaagttcctgctgagatggtccctgaggcctaccgaacctggcgaagtgcgtagactggaacccggccagagattcgccatcgaccagctgaatcacctgaacgccctgaaagaagatcggctgaagaagatggccaacaccatcatcatgcacgccctgggctactgctacgacgtgcggaagaagaaatggcaggctaagaaccccgcctgccagatcatcctgttcgaggatctgagcaactacaacccctacgaggaaaggtcccgcttcgagaacagcaagctcatgaagtggtccagacgcgagatccccagacaggttgcactgcagggcgagatctatggcctgcaagtgggagaagtgggcgctcagttcagcagcagattccacgccaagacaggcagccctggcatcagatgtagcgtcgtgaccaaagagaagctgcaggacaatcggttcttcaagaatctgcagagagagggcagactgaccctggacaaaatcgccgtgctgaaagagggcgatctgtacccagacaaaggcggcgagaagttcatcagcctgagcaaggatcggaagtgcgtgaccacacacgccgacatcaacgccgctcagaacctgcagaagcggttctggacaagaacccacggcttctacaaggtgtactgcaaggcctaccaggtggacggccagaccgtgtacatccctgagagcaaggaccagaagcagaagatcatcgaagagttcggcgagggctacttcattctgaaggacggggtgtacgaatgggtcaacgccggcaagctgaaaatcaagaagggcagctccaagcagagcagcagcgagctggtggatagcgacatcctgaaagacagcttcgacctggcctccgagctgaaaggcgaaaagctgatgctgtacagggaccccagcggcaatgtgttccccagcgacaaatggatggccgctggcgtgttcttcggaaagctggaacgcatcctgatcagcaagctgaccaaccagtactccatcagcaccatcgaggacgacagcagcaagcagtctatgaaaaggccggcggccacgaaaaaggccggccaggcaaaaaagaaaaag

SEQ ID NO: 261 - protein, 17 aa, synthetic construct
  REGION 1..17: note = synthetic peptide sequence
MAPKKKRKVGIHGVPAA

SEQ ID NO: 262 - DNA, 51 bp, synthetic construct
  misc_feature 1..51: note = synthetic oligonucleotide sequence
  source 1..51: mol_type = other DNA
atggccccaaagaagaagcggaaggtcggtatccacggagtcccagcagcc

SEQ ID NO: 263 - protein, 1554 aa, synthetic construct
  REGION 1..1554: note = 101 Cas9 TadAins 1015 polypeptide sequence
MDKKYSIGLAIGTNSVGWAVITDEYKVPSKKFKVLGNTDRHSIKKNLIGALLFDSGETAEATRLKRTARRRYTRRKNRICYLQEIFSNEMAKVDDSFFHRLEESFLVEEDKKHERHPIFGNIVDEVAYHEKYPTIYHLRKKLVDSTDKADLRLIYLALAHMIKFRGHFLIEGDLNPDNSDVDKLFIQLVQTYNQLFEENPINASGVDAKAILSARLSKSRRLENLIAQLPGEKKNGLFGNLIALSLGLTPNFKSNFDLAEDAKLQLSKDTYDDDLDNLLAQIGDQYADLFLAAKNLSDAILLSDILRVNTEITKAPLSASMIKRYDEHHQDLTLLKALVRQQLPEKYKEIFFDQSKNGYAGYIDGGASQEEFYKFIKPILEKMDGTEELLVKLNREDLLRKQRTFDNGSIPHQIHLGELHAILRRQEDFYPFLKDNREKIEKILTFRIPYYVGPLARGNSRFAWMTRKSEETITPWNFEEVVDKGASAQSFIERMTNFDKNLPNEKVLPKHSLLYEYFTVYNELTKVKYVTEGMRKPAFLSGEQKKAIVDLLFKTNRKVTVKQLKEDYFKKIECFDSVEISGVEDRFNASLGTYHDLLKIIKDKDFLDNEENEDILEDIVLTLTLFEDREMIEERLKTYAHLFDDKVMKQLKRRRYTGWGRLSRKLINGIRDKQSGKTILDFLKSDGFANRNFMQLIHDDSLTFKEDIQKAQVSGQGDSLHEHIANLAGSPAIKKGILQTVKVVDELVKVMGRHKPENIVIEMARENQTTQKGQKNSRERMKRIEEGIKELGSQILKEHPVENTQLQNEKLYLYYLQNGRDMYVDQELDINRLSDYDVDHIVPQSFLKDDSIDNKVLTRSDKNRGKSDNVPSEEVVKKMKNYWRQLLNAKLITQRKFDNLTKAERGGLSELDKAGFIKRQLVETRQITKHVAQILDSRMNTKYDENDKLIREVKVITLKSKLVSDFRKDFQFYKVREINNYHHAHDAYLNAVVGTALIKKYPKLESEFVYGDYKVGSSGSETPGTSESATPESSGSEVEFSHEYWMRHALTLAKRARDEREVPVGAVLVLNNRVIGEGWNRAIGLHDPTAHAEIMALRQGGLVMQNYRLIDATLYVTFEPCVMCAGAMIHSRIGRVVFGVRNAKTGAAGSLMDVLHYPGMNHRVEITEGILADECAALLCYFFRMPRQVFNAQKKAQSSTDYDVRKMIAKSEQEIGKATAKYFFYSNIMNFFKTEITLANGEIRKRPLIETNGETGEIVWDKGRDFATVRKVLSMPQVNIVKKTEVQTGGFSKESILPKRNSDKLIARKKDWDPKKYGGFDSPTVAYSVLVVAKVEKGKSKKLKSVKELLGITIMERSSFEKNPIDFLEAKGYKEVKKDLIIKLPKYSLFELENGRKRMLASAGELQKGNELALPSKYVNFLYLASHYEKLKGSPEDNEQKQLFVEQHKHYLDEIIEQISEFSKRVILADANLDKVLSAYNKHRDKPIREQAENIIHLFTLTNLGAPAAFKYFDTTIDRKRYTSTKEVLDATLIHQSITGLYETRIDLSQLGGD

SEQ ID NO: 264 - protein, 1554 aa, synthetic construct
  REGION 1..1554: note = 102 Cas9 TadAins 1022 polypeptide sequence
MDKKYSIGLAIGTNSVGWAVITDEYKVPSKKFKVLGNTDRHSIKKNLIGALLFDSGETAEATRLKRTARRRYTRRKNRICYLQEIFSNEMAKVDDSFFHRLEESFLVEEDKKHERHPIFGNIVDEVAYHEKYPTIYHLRKKLVDSTDKADLRLIYLALAHMIKFRGHFLIEGDLNPDNSDVDKLFIQLVQTYNQLFEENPINASGVDAKAILSARLSKSRRLENLIAQLPGEKKNGLFGNLIALSLGLTPNFKSNFDLAEDAKLQLSKDTYDDDLDNLLAQIGDQYADLFLAAKNLSDAILLSDILRVNTEITKAPLSASMIKRYDEHHQDLTLLKALVRQQLPEKYKEIFFDQSKNGYAGYIDGGASQEEFYKFIKPILEKMDGTEELLVKLNREDLLRKQRTFDNGSIPHQIHLGELHAILRRQEDFYPFLKDNREKIEKILTFRIPYYVGPLARGNSRFAWMTRKSEETITPWNFEEVVDKGASAQSFIERMTNFDKNLPNEKVLPKHSLLYEYFTVYNELTKVKYVTEGMRKPAFLSGEQKKAIVDLLFKTNRKVTVKQLKEDYFKKIECFDSVEISGVEDRFNASLGTYHDLLKIIKDKDFLDNEENEDILEDIVLTLTLFEDREMIEERLKTYAHLFDDKVMKQLKRRRYTGWGRLSRKLINGIRDKQSGKTILDFLKSDGFANRNFMQLIHDDSLTFKEDIQKAQVSGQGDSLHEHIANLAGSPAIKKGILQTVKVVDELVKVMGRHKPENIVIEMARENQTTQKGQKNSRERMKRIEEGIKELGSQILKEHPVENTQLQNEKLYLYYLQNGRDMYVDQELDINRLSDYDVDHIVPQSFLKDDSIDNKVLTRSDKNRGKSDNVPSEEVVKKMKNYWRQLLNAKLITQRKFDNLTKAERGGLSELDKAGFIKRQLVETRQITKHVAQILDSRMNTKYDENDKLIREVKVITLKSKLVSDFRKDFQFYKVREINNYHHAHDAYLNAVVGTALIKKYPKLESEFVYGDYKVYDVRKMIGSSGSETPGTSESATPESSGSEVEFSHEYWMRHALTLAKRARDEREVPVGAVLVLNNRVIGEGWNRAIGLHDPTAHAEIMALRQGGLVMQNYRLIDATLYVTFEPCVMCAGAMIHSRIGRVVFGVRNAKTGAAGSLMDVLHYPGMNHRVEITEGILADECAALLCYFFRMPRQVFNAQKKAQSSTDAKSEQEIGKATAKYFFYSNIMNFFKTEITLANGEIRKRPLIETNGETGEIVWDKGRDFATVRKVLSMPQVNIVKKTEVQTGGFSKESILPKRNSDKLIARKKDWDPKKYGGFDSPTVAYSVLVVAKVEKGKSKKLKSVKELLGITIMERSSFEKNPIDFLEAKGYKEVKKDLIIKLPKYSLFELENGRKRMLASAGELQKGNELALPSKYVNFLYLASHYEKLKGSPEDNEQKQLFVEQHKHYLDEIIEQISEFSKRVILADANLDKVLSAYNKHRDKPIREQAENIIHLFTLTNLGAPAAFKYFDTTIDRKRYTSTKEVLDATLIHQSITGLYETRIDLSQLGGD

SEQ ID NO: 265 - protein, 1554 aa, synthetic construct
  REGION 1..1554: note = 103 Cas9 TadAins 1029 polypeptide sequence
MDKKYSIGLAIGTNSVGWAVITDEYKVPSKKFKVLGNTDRHSIKKNLIGALLFDSGETAEATRLKRTARRRYTRRKNRICYLQEIFSNEMAKVDDSFFHRLEESFLVEEDKKHERHPIFGNIVDEVAYHEKYPTIYHLRKKLVDSTDKADLRLIYLALAHMIKFRGHFLIEGDLNPDNSDVDKLFIQLVQTYNQLFEENPINASGVDAKAILSARLSKSRRLENLIAQLPGEKKNGLFGNLIALSLGLTPNFKSNFDLAEDAKLQLSKDTYDDDLDNLLAQIGDQYADLFLAAKNLSDAILLSDILRVNTEITKAPLSASMIKRYDEHHQDLTLLKALVRQQLPEKYKEIFFDQSKNGYAGYIDGGASQEEFYKFIKPILEKMDGTEELLVKLNREDLLRKQRTFDNGSIPHQIHLGELHAILRRQEDFYPFLKDNREKIEKILTFRIPYYVGPLARGNSRFAWMTRKSEETITPWNFEEVVDKGASAQSFIERMTNFDKNLPNEKVLPKHSLLYEYFTVYNELTKVKYVTEGMRKPAFLSGEQKKAIVDLLFKTNRKVTVKQLKEDYFKKIECFDSVEISGVEDRFNASLGTYHDLLKIIKDKDFLDNEENEDILEDIVLTLTLFEDREMIEERLKTYAHLFDDKVMKQLKRRRYTGWGRLSRKLINGIRDKQSGKTILDFLKSDGFANRNFMQLIHDDSLTFKEDIQKAQVSGQGDSLHEHIANLAGSPAIKKGILQTVKVVDELVKVMGRHKPENIVIEMARENQTTQKGQKNSRERMKRIEEGIKELGSQILKEHPVENTQLQNEKLYLYYLQNGRDMYVDQELDINRLSDYDVDHIVPQSFLKDDSIDNKVLTRSDKNRGKSDNVPSEEVVKKMKNYWRQLLNAKLITQRKFDNLTKAERGGLSELDKAGFIKRQLVETRQITKHVAQILDSRMNTKYDENDKLIREVKVITLKSKLVSDFRKDFQFYKVREINNYHHAHDAYLNAVVGTALIKKYPKLESEFVYGDYKVYDVRKMIAKSEQEIGSSGSETPGTSESATPESSGSEVEFSHEYWMRHALTLAKRARDEREVPVGAVLVLNNRVIGEGWNRAIGLHDPTAHAEIMALRQGGLVMQNYRLIDATLYVTFEPCVMCAGAMIHSRIGRVVFGVRNAKTGAAGSLMDVLHYPGMNHRVEITEGILADECAALLCYFFRMPRQVFNAQKKAQSSTDGKATAKYFFYSNIMNFFKTEITLANGEIRKRPLIETNGETGEIVWDKGRDFATVRKVLSMPQVNIVKKTEVQTGGFSKESILPKRNSDKLIARKKDWDPKKYGGFDSPTVAYSVLVVAKVEKGKSKKLKSVKELLGITIMERSSFEKNPIDFLEAKGYKEVKKDLIIKLPKYSLFELENGRKRMLASAGELQKGNELALPSKYVNFLYLASHYEKLKGSPEDNEQKQLFVEQHKHYLDEIIEQISEFSKRVILADANLDKVLSAYNKHRDKPIREQAENIIHLFTLTNLGAPAAFKYFDTTIDRKRYTSTKEVLDATLIHQSITGLYETRIDLSQLGGD

SEQ ID NO: 266 - protein, 1554 aa, synthetic construct
  REGION 1..1554: note = 103 Cas9 TadAins 1040 polypeptide sequence
MDKKYSIGLAIGTNSVGWAVITDEYKVPSKKFKVLGNTDRHSIKKNLIGALLFDSGETAEATRLKRTARRRYTRRKNRICYLQEIFSNEMAKVDDSFFHRLEESFLVEEDKKHERHPIFGNIVDEVAYHEKYPTIYHLRKKLVDSTDKADLRLIYLALAHMIKFRGHFLIEGDLNPDNSDVDKLFIQLVQTYNQLFEENPINASGVDAKAILSARLSKSRRLENLIAQLPGEKKNGLFGNLIALSLGLTPNFKSNFDLAEDAKLQLSKDTYDDDLDNLLAQIGDQYADLFLAAKNLSDAILLSDILRVNTEITKAPLSASMIKRYDEHHQDLTLLKALVRQQLPEKYKEIFFDQSKNGYAGYIDGGASQEEFYKFIKPILEKMDGTEELLVKLNREDLLRKQRTFDNGSIPHQIHLGELHAILRRQEDFYPFLKDNREKIEKILTFRIPYYVGPLARGNSRFAWMTRKSEETITPWNFEEVVDKGASAQSFIERMTNFDKNLPNEKVLPKHSLLYEYFTVYNELTKVKYVTEGMRKPAFLSGEQKKAIVDLLFKTNRKVTVKQLKEDYFKKIECFDSVEISGVEDRFNASLGTYHDLLKIIKDKDFLDNEENEDILEDIVLTLTLFEDREMIEERLKTYAHLFDDKVMKQLKRRRYTGWGRLSRKLINGIRDKQSGKTILDFLKSDGFANRNFMQLIHDDSLTFKEDIQKAQVSGQGDSLHEHIANLAGSPAIKKGILQTVKVVDELVKVMGRHKPENIVIEMARENQTTQKGQKNSRERMKRIEEGIKELGSQILKEHPVENTQLQNEKLYLYYLQNGRDMYVDQELDINRLSDYDVDHIVPQSFLKDDSIDNKVLTRSDKNRGKSDNVPSEEVVKKMKNYWRQLLNAKLITQRKFDNLTKAERGGLSELDKAGFIKRQLVETRQITKHVAQILDSRMNTKYDENDKLIREVKVITLKSKLVSDFRKDFQFYKVREINNYHHAHDAYLNAVVGTALIKKYPKLESEFVYGDYKVYDVRKMIAKSEQEIGKATAKYFFYSGSSGSETPGTSESATPESSGSEVEFSHEYWMRHALTLAKRARDEREVPVGAVLVLNNRVIGEGWNRAIGLHDPTAHAEIMALRQGGLVMQNYRLIDATLYVTFEPCVMCAGAMIHSRIGRVVFGVRNAKTGAAGSLMDVLHYPGMNHRVEITEGILADECAALLCYFFRMPRQVFNAQKKAQSSTDNIMNFFKTEITLANGEIRKRPLIETNGETGEIVWDKGRDFATVRKVLSMPQVNIVKKTEVQTGGFSKESILPKRNSDKLIARKKDWDPKKYGGFDSPTVAYSVLVVAKVEKGKSKKLKSVKELLGITIMERSSFEKNPIDFLEAKGYKEVKKDLIIKLPKYSLFELENGRKRMLASAGELQKGNELALPSKYVNFLYLASHYEKLKGSPEDNEQKQLFVEQHKHYLDEIIEQISEFSKRVILADANLDKVLSAYNKHRDKPIREQAENIIHLFTLTNLGAPAAFKYFDTTIDRKRYTSTKEVLDATLIHQSITGLYETRIDLSQLGGD

SEQ ID NO: 267 - protein, 1554 aa, synthetic construct
  REGION 1..1554: note = 105 Cas9 TadAins 1068 polypeptide sequence
MDKKYSIGLAIGTNSVGWAVITDEYKVPSKKFKVLGNTDRHSIKKNLIGALLFDSGETAEATRLKRTARRRYTRRKNRICYLQEIFSNEMAKVDDSFFHRLEESFLVEEDKKHERHPIFGNIVDEVAYHEKYPTIYHLRKKLVDSTDKADLRLIYLALAHMIKFRGHFLIEGDLNPDNSDVDKLFIQLVQTYNQLFEENPINASGVDAKAILSARLSKSRRLENLIAQLPGEKKNGLFGNLIALSLGLTPNFKSNFDLAEDAKLQLSKDTYDDDLDNLLAQIGDQYADLFLAAKNLSDAILLSDILRVNTEITKAPLSASMIKRYDEHHQDLTLLKALVRQQLPEKYKEIFFDQSKNGYAGYIDGGASQEEFYKFIKPILEKMDGTEELLVKLNREDLLRKQRTFDNGSIPHQIHLGELHAILRRQEDFYPFLKDNREKIEKILTFRIPYYVGPLARGNSRFAWMTRKSEETITPWNFEEVVDKGASAQSFIERMTNFDKNLPNEKVLPKHSLLYEYFTVYNELTKVKYVTEGMRKPAFLSGEQKKAIVDLLFKTNRKVTVKQLKEDYFKKIECFDSVEISGVEDRFNASLGTYHDLLKIIKDKDFLDNEENEDILEDIVLTLTLFEDREMIEERLKTYAHLFDDKVMKQLKRRRYTGWGRLSRKLINGIRDKQSGKTILDFLKSDGFANRNFMQLIHDDSLTFKEDIQKAQVSGQGDSLHEHIANLAGSPAIKKGILQTVKVVDELVKVMGRHKPENIVIEMARENQTTQKGQKNSRERMKRIEEGIKELGSQILKEHPVENTQLQNEKLYLYYLQNGRDMYVDQELDINRLSDYDVDHIVPQSFLKDDSIDNKVLTRSDKNRGKSDNVPSEEVVKKMKNYWRQLLNAKLITQRKFDNLTKAERGGLSELDKAGFIKRQLVETRQITKHVAQILDSRMNTKYDENDKLIREVKVITLKSKLVSDFRKDFQFYKVREINNYHHAHDAYLNAVVGTALIKKYPKLESEFVYGDYKVYDVRKMIAKSEQEIGKATAKYFFYSNIMNFFKTEITLANGEIRKRPLIETNGEGSSGSETPGTSESATPESSGSEVEFSHEYWMRHALTLAKRARDEREVPVGAVLVLNNRVIGEGWNRAIGLHDPTAHAEIMALRQGGLVMQNYRLIDATLYVTFEPCVMCAGAMIHSRIGRVVFGVRNAKTGAAGSLMDVLHYPGMNHRVEITEGILADECAALLCYFFRMPRQVFNAQKKAQSSTDTGEIVWDKGRDFATVRKVLSMPQVNIVKKTEVQTGGFSKESILPKRNSDKLIARKKDWDPKKYGGFDSPTVAYSVLVVAKVEKGKSKKLKSVKELLGITIMERSSFEKNPIDFLEAKGYKEVKKDLIIKLPKYSLFELENGRKRMLASAGELQKGNELALPSKYVNFLYLASHYEKLKGSPEDNEQKQLFVEQHKHYLDEIIEQISEFSKRVILADANLDKVLSAYNKHRDKPIREQAENIIHLFTLTNLGAPAAFKYFDTTIDRKRYTSTKEVLDATLIHQSITGLYETRIDLSQLGGD

SEQ ID NO: 268 - protein, 1554 aa, synthetic construct
  REGION 1..1554: note = 106 Cas9 TadAins 1247 polypeptide sequence
MDKKYSIGLAIGTNSVGWAVITDEYKVPSKKFKVLGNTDRHSIKKNLIGALLFDSGETAEATRLKRTARRRYTRRKNRICYLQEIFSNEMAKVDDSFFHRLEESFLVEEDKKHERHPIFGNIVDEVAYHEKYPTIYHLRKKLVDSTDKADLRLIYLALAHMIKFRGHFLIEGDLNPDNSDVDKLFIQLVQTYNQLFEENPINASGVDAKAILSARLSKSRRLENLIAQLPGEKKNGLFGNLIALSLGLTPNFKSNFDLAEDAKLQLSKDTYDDDLDNLLAQIGDQYADLFLAAKNLSDAILLSDILRVNTEITKAPLSASMIKRYDEHHQDLTLLKALVRQQLPEKYKEIFFDQSKNGYAGYIDGGASQEEFYKFIKPILEKMDGTEELLVKLNREDLLRKQRTFDNGSIPHQIHLGELHAILRRQEDFYPFLKDNREKIEKILTFRIPYYVGPLARGNSRFAWMTRKSEETITPWNFEEVVDKGASAQSFIERMTNFDKNLPNEKVLPKHSLLYEYFTVYNELTKVKYVTEGMRKPAFLSGEQKKAIVDLLFKTNRKVTVKQLKEDYFKKIECFDSVEISGVEDRFNASLGTYHDLLKIIKDKDFLDNEENEDILEDIVLTLTLFEDREMIEERLKTYAHLFDDKVMKQLKRRRYTGWGRLSRKLINGIRDKQSGKTILDFLKSDGFANRNFMQLIHDDSLTFKEDIQKAQVSGQGDSLHEHIANLAGSPAIKKGILQTVKVVDELVKVMGRHKPENIVIEMARENQTTQKGQKNSRERMKRIEEGIKELGSQILKEHPVENTQLQNEKLYLYYLQNGRDMYVDQELDINRLSDYDVDHIVPQSFLKDDSIDNKVLTRSDKNRGKSDNVPSEEVVKKMKNYWRQLLNAKLITQRKFDNLTKAERGGLSELDKAGFIKRQLVETRQITKHVAQILDSRMNTKYDENDKLIREVKVITLKSKLVSDFRKDFQFYKVREINNYHHAHDAYLNAVVGTALIKKYPKLESEFVYGDYKVYDVRKMIAKSEQEIGKATAKYFFYSNIMNFFKTEITLANGEIRKRPLIETNGETGEIVWDKGRDFATVRKVLSMPQVNIVKKTEVQTGGFSKESILPKRNSDKLIARKKDWDPKKYGGFDSPTVAYSVLVVAKVEKGKSKKLKSVKELLGITIMERSSFEKNPIDFLEAKGYKEVKKDLIIKLPKYSLFELENGRKRMLASAGELQKGNELALPSKYVNFLYLASHYEKLKGGSSGSETPGTSESATPESSGSEVEFSHEYWMRHALTLAKRARDEREVPVGAVLVLNNRVIGEGWNRAIGLHDPTAHAEIMALRQGGLVMQNYRLIDATLYVTFEPCVMCAGAMIHSRIGRVVFGVRNAKTGAAGSLMDVLHYPGMNHRVEITEGILADECAALLCYFFRMPRQVFNAQKKAQSSTDSPEDNEQKQLFVEQHKHYLDEIIEQISEFSKRVILADANLDKVLSAYNKHRDKPIREQAENIIHLFTLTNLGAPAAFKYFDTTIDRKRYTSTKEVLDATLIHQSITGLYETRIDLSQLGGD

SEQ ID NO: 269 - protein, 1554 aa, synthetic construct
  REGION 1..1554: note = 107 Cas9 TadAins 1054 polypeptide sequence
MDKKYSIGLAIGTNSVGWAVITDEYKVPSKKFKVLGNTDRHSIKKNLIGALLFDSGETAEATRLKRTARRRYTRRKNRICYLQEIFSNEMAKVDDSFFHRLEESFLVEEDKKHERHPIFGNIVDEVAYHEKYPTIYHLRKKLVDSTDKADLRLIYLALAHMIKFRGHFLIEGDLNPDNSDVDKLFIQLVQTYNQLFEENPINASGVDAKAILSARLSKSRRLENLIAQLPGEKKNGLFGNLIALSLGLTPNFKSNFDLAEDAKLQLSKDTYDDDLDNLLAQIGDQYADLFLAAKNLSDAILLSDILRVNTEITKAPLSASMIKRYDEHHQDLTLLKALVRQQLPEKYKEIFFDQSKNGYAGYIDGGASQEEFYKFIKPILEKMDGTEELLVKLNREDLLRKQRTFDNGSIPHQIHLGELHAILRRQEDFYPFLKDNREKIEKILTFRIPYYVGPLARGNSRFAWMTRKSEETITPWNFEEVVDKGASAQSFIERMTNFDKNLPNEKVLPKHSLLYEYFTVYNELTKVKYVTEGMRKPAFLSGEQKKAIVDLLFKTNRKVTVKQLKEDYFKKIECFDSVEISGVEDRFNASLGTYHDLLKIIKDKDFLDNEENEDILEDIVLTLTLFEDREMIEERLKTYAHLFDDKVMKQLKRRRYTGWGRLSRKLINGIRDKQSGKTILDFLKSDGFANRNFMQLIHDDSLTFKEDIQKAQVSGQGDSLHEHIANLAGSPAIKKGILQTVKVVDELVKVMGRHKPENIVIEMARENQTTQKGQKNSRERMKRIEEGIKELGSQILKEHPVENTQLQNEKLYLYYLQNGRDMYVDQELDINRLSDYDVDHIVPQSFLKDDSIDNKVLTRSDKNRGKSDNVPSEEVVKKMKNYWRQLLNAKLITQRKFDNLTKAERGGLSELDKAGFIKRQLVETRQITKHVAQILDSRMNTKYDENDKLIREVKVITLKSKLVSDFRKDFQFYKVREINNYHHAHDAYLNAVVGTALIKKYPKLESEFVYGDYKVYDVRKMIAKSEQEIGKATAKYFFYSNIMNFFKTEITLANGSSGSETPGTSESATPESSGSEVEFSHEYWMRHALTLAKRARDEREVPVGAVLVLNNRVIGEGWNRAIGLHDPTAHAEIMALRQGGLVMQNYRLIDATLYVTFEPCVMCAGAMIHSRIGRVVFGVRNAKTGAAGSLMDVLHYPGMNHRVEITEGILADECAALLCYFFRMPRQVFNAQKKAQSSTDGEIRKRPLIETNGETGEIVWDKGRDFATVRKVLSMPQVNIVKKTEVQTGGFSKESILPKRNSDKLIARKKDWDPKKYGGFDSPTVAYSVLVVAKVEKGKSKKLKSVKELLGITIMERSSFEKNPIDFLEAKGYKEVKKDLIIKLPKYSLFELENGRKRMLASAGELQKGNELALPSKYVNFLYLASHYEKLKGSPEDNEQKQLFVEQHKHYLDEIIEQISEFSKRVILADANLDKVLSAYNKHRDKPIREQAENIIHLFTLTNLGAPAAFKYFDTTIDRKRYTSTKEVLDATLIHQSITGLYETRIDLSQLGGD

SEQ ID NO: 270 - protein, 1554 aa, synthetic construct
  REGION 1..1554: note = 108 Cas9 TadAins 1026 polypeptide sequence
MDKKYSIGLAIGTNSVGWAVITDEYKVPSKKFKVLGNTDRHSIKKNLIGALLFDSGETAEATRLKRTARRRYTRRKNRICYLQEIFSNEMAKVDDSFFHRLEESFLVEEDKKHERHPIFGNIVDEVAYHEKYPTIYHLRKKLVDSTDKADLRLIYLALAHMIKFRGHFLIEGDLNPDNSDVDKLFIQLVQTYNQLFEENPINASGVDAKAILSARLSKSRRLENLIAQLPGEKKNGLFGNLIALSLGLTPNFKSNFDLAEDAKLQLSKDTYDDDLDNLLAQIGDQYADLFLAAKNLSDAILLSDILRVNTEITKAPLSASMIKRYDEHHQDLTLLKALVRQQLPEKYKEIFFDQSKNGYAGYIDGGASQEEFYKFIKPILEKMDGTEELLVKLNREDLLRKQRTFDNGSIPHQIHLGELHAILRRQEDFYPFLKDNREKIEKILTFRIPYYVGPLARGNSRFAWMTRKSEETITPWNFEEVVDKGASAQSFIERMTNFDKNLPNEKVLPKHSLLYEYFTVYNELTKVKYVTEGMRKPAFLSGEQKKAIVDLLFKTNRKVTVKQLKEDYFKKIECFDSVEISGVEDRFNASLGTYHDLLKIIKDKDFLDNEENEDILEDIVLTLTLFEDREMIEERLKTYAHLFDDKVMKQLKRRRYTGWGRLSRKLINGIRDKQSGKTILDFLKSDGFANRNFMQLIHDDSLTFKEDIQKAQVSGQGDSLHEHIANLAGSPAIKKGILQTVKVVDELVKVMGRHKPENIVIEMARENQTTQKGQKNSRERMKRIEEGIKELGSQILKEHPVENTQLQNEKLYLYYLQNGRDMYVDQELDINRLSDYDVDHIVPQSFLKDDSIDNKVLTRSDKNRGKSDNVPSEEVVKKMKNYWRQLLNAKLITQRKFDNLTKAERGGLSELDKAGFIKRQLVETRQITKHVAQILDSRMNTKYDENDKLIREVKVITLKSKLVSDFRKDFQFYKVREINNYHHAHDAYLNAVVGTALIKKYPKLESEFVYGDYKVYDVRKMIAKSEGSSGSETPGTSESATPESSGSEVEFSHEYWMRHALTLAKRARDEREVPVGAVLVLNNRVIGEGWNRAIGLHDPTAHAEIMALRQGGLVMQNYRLIDATLYVTFEPCVMCAGAMIHSRIGRVVFGVRNAKTGAAGSLMDVLHYPGMNHRVEITEGILADECAALLCYFFRMPRQVFNAQKKAQSSTDQEIGKATAKYFFYSNIMNFFKTEITLANGEIRKRPLIETNGETGEIVWDKGRDFATVRKVLSMPQVNIVKKTEVQTGGFSKESILPKRNSDKLIARKKDWDPKKYGGFDSPTVAYSVLVVAKVEKGKSKKLKSVKELLGITIMERSSFEKNPIDFLEAKGYKEVKKDLIIKLPKYSLFELENGRKRMLASAGELQKGNELALPSKYVNFLYLASHYEKLKGSPEDNEQKQLFVEQHKHYLDEIIEQISEFSKRVILADANLDKVLSAYNKHRDKPIREQAENIIHLFTLTNLGAPAAFKYFDTTIDRKRYTSTKEVLDATLIHQSITGLYETRIDLSQLGGD

SEQ ID NO: 271 - protein, 1540 aa, synthetic construct
  REGION 1..1540: note = 109 Cas9 TadAins 768 polypeptide sequence
MDKKYSIGLAIGTNSVGWAVITDEYKVPSKKFKVLGNTDRHSIKKNLIGALLFDSGETAEATRLKRTARRRYTRRKNRICYLQEIFSNEMAKVDDSFFHRLEESFLVEEDKKHERHPIFGNIVDEVAYHEKYPTIYHLRKKLVDSTDKADLRLIYLALAHMIKFRGHFLIEGDLNPDNSDVDKLFIQLVQTYNQLFEENPINASGVDAKAILSARLSKSRRLENLIAQLPGEKKNGLFGNLIALSLGLTPNFKSNFDLAEDAKLQLSKDTYDDDLDNLLAQIGDQYADLFLAAKNLSDAILLSDILRVNTEITKAPLSASMIKRYDEHHQDLTLLKALVRQQLPEKYKEIFFDQSKNGYAGYIDGGASQEEFYKFIKPILEKMDGTEELLVKLNREDLLRKQRTFDNGSIPHQIHLGELHAILRRQEDFYPFLKDNREKIEKILTFRIPYYVGPLARGNSRFAWMTRKSEETITPWNFEEVVDKGASAQSFIERMTNFDKNLPNEKVLPKHSLLYEYFTVYNELTKVKYVTEGMRKPAFLSGEQKKAIVDLLFKTNRKVTVKQLKEDYFKKIECFDSVEISGVEDRFNASLGTYHDLLKIIKDKDFLDNEENEDILEDIVLTLTLFEDREMIEERLKTYAHLFDDKVMKQLKRRRYTGWGRLSRKLINGIRDKQSGKTILDFLKSDGFANRNFMQLIHDDSLTFKEDIQKAQVSGQGDSLHEHIANLAGSPAIKKGILQTVKVVDELVKVMGRHKPENIVIEMARENQGSSGSETPGTSESATPESSGSEVEFSHEYWMRHALTLAKRARDEREVPVGAVLVLNNRVIGEGWNRAIGLHDPTAHAEIMALRQGGLVMQNYRLIDATLYVTFEPCVMCAGAMIHSRIGRVVFGVRNAKTGAAGSLMDVLHYPGMNHRVEITEGILADECAALLCYFFRMPRTTQKGQKNSRERMKRIEEGIKELGSQILKEHPVENTQLQNEKLYLYYLQNGRDMYVDQELDINRLSDYDVDHIVPQSFLKDDSIDNKVLTRSDKNRGKSDNVPSEEVVKKMKNYWRQLLNAKLITQRKFDNLTKAERGGLSELDKAGFIKRQLVETRQITKHVAQILDSRMNTKYDENDKLIREVKVITLKSKLVSDFRKDFQFYKVREINNYHHAHDAYLNAVVGTALIKKYPKLESEFVYGDYKVYDVRKMIAKSEQEIGKATAKYFFYSNIMNFFKTEITLANGEIRKRPLIETNGETGEIVWDKGRDFATVRKVLSMPQVNIVKKTEVQTGGFSKESILPKRNSDKLIARKKDWDPKKYGGFDSPTVAYSVLVVAKVEKGKSKKLKSVKELLGITIMERSSFEKNPIDFLEAKGYKEVKKDLIIKLPKYSLFELENGRKRMLASAGELQKGNELALPSKYVNFLYLASHYEKLKGSPEDNEQKQLFVEQHKHYLDEIIEQISEFSKRVILADANLDKVLSAYNKHRDKPIREQAENIIHLFTLTNLGAPAAFKYFDTTIDRKRYTSTKEVLDATLIHQSITGLYETRIDLSQLGGD

SEQ ID NO: 272 - protein, 1540 aa, synthetic construct
  REGION 1..1540: note = 110.1 Cas9 TadAins 1250 polypeptide sequence
MDKKYSIGLAIGTNSVGWAVITDEYKVPSKKFKVLGNTDRHSIKKNLIGALLFDSGETAEATRLKRTARRRYTRRKNRICYLQEIFSNEMAKVDDSFFHRLEESFLVEEDKKHERHPIFGNIVDEVAYHEKYPTIYHLRKKLVDSTDKADLRLIYLALAHMIKFRGHFLIEGDLNPDNSDVDKLFIQLVQTYNQLFEENPINASGVDAKAILSARLSKSRRLENLIAQLPGEKKNGLFGNLIALSLGLTPNFKSNFDLAEDAKLQLSKDTYDDDLDNLLAQIGDQYADLFLAAKNLSDAILLSDILRVNTEITKAPLSASMIKRYDEHHQDLTLLKALVRQQLPEKYKEIFFDQSKNGYAGYIDGGASQEEFYKFIKPILEKMDGTEELLVKLNREDLLRKQRTFDNGSIPHQIHLGELHAILRRQEDFYPFLKDNREKIEKILTFRIPYYVGPLARGNSRFAWMTRKSEETITPWNFEEVVDKGASAQSFIERMTNFDKNLPNEKVLPKHSLLYEYFTVYNELTKVKYVTEGMRKPAFLSGEQKKAIVDLLFKTNRKVTVKQLKEDYFKKIECFDSVEISGVEDRFNASLGTYHDLLKIIKDKDFLDNEENEDILEDIVLTLTLFEDREMIEERLKTYAHLFDDKVMKQLKRRRYTGWGRLSRKLINGIRDKQSGKTILDFLKSDGFANRNFMQLIHDDSLTFKEDIQKAQVSGQGDSLHEHIANLAGSPAIKKGILQTVKVVDELVKVMGRHKPENIVIEMARENQTTQKGQKNSRERMKRIEEGIKELGSQILKEHPVENTQLQNEKLYLYYLQNGRDMYVDQELDINRLSDYDVDHIVPQSFLKDDSIDNKVLTRSDKNRGKSDNVPSEEVVKKMKNYWRQLLNAKLITQRKFDNLTKAERGGLSELDKAGFIKRQLVETRQITKHVAQILDSRMNTKYDENDKLIREVKVITLKSKLVSDFRKDFQFYKVREINNYHHAHDAYLNAVVGTALIKKYPKLESEFVYGDYKVYDVRKMIAKSEQEIGKATAKYFFYSNIMNFFKTEITLANGEIRKRPLIETNGETGEIVWDKGRDFATVRKVLSMPQVNIVKKTEVQTGGFSKESILPKRNSDKLIARKKDWDPKKYGGFDSPTVAYSVLVVAKVEKGKSKKLKSVKELLGITIMERSSFEKNPIDFLEAKGYKEVKKDLIIKLPKYSLFELENGRKRMLASAGELQKGNELALPSKYVNFLYLASHYEKLKGSPGSSGSETPGTSESATPESSGSEVEFSHEYWMRHALTLAKRARDEREVPVGAVLVLNNRVIGEGWNRAIGLHDPTAHAEIMALRQGGLVMQNYRLIDATLYVTFEPCVMCAGAMIHSRIGRVVFGVRNAKTGAAGSLMDVLHYPGMNHRVEITEGILADECAALLCYFFRMPREDNEQKQLFVEQHKHYLDEIIEQISEFSKRVILADANLDKVLSAYNKHRDKPIREQAENIIHLFTLTNLGAPAAFKYFDTTIDRKRYTSTKEVLDATLIHQSITGLYETRIDLSQLGGD

SEQ ID NO: 273 - protein, 1543 aa, synthetic construct
  REGION 1..1543: note = 110.2 Cas9 TadAins 1250 polypeptide sequence
MDKKYSIGLAIGTNSVGWAVITDEYKVPSKKFKVLGNTDRHSIKKNLIGALLFDSGETAEATRLKRTARRRYTRRKNRICYLQEIFSNEMAKVDDSFFHRLEESFLVEEDKKHERHPIFGNIVDEVAYHEKYPTIYHLRKKLVDSTDKADLRLIYLALAHMIKFRGHFLIEGDLNPDNSDVDKLFIQLVQTYNQLFEENPINASGVDAKAILSARLSKSRRLENLIAQLPGEKKNGLFGNLIALSLGLTPNFKSNFDLAEDAKLQLSKDTYDDDLDNLLAQIGDQYADLFLAAKNLSDAILLSDILRVNTEITKAPLSASMIKRYDEHHQDLTLLKALVRQQLPEKYKEIFFDQSKNGYAGYIDGGASQEEFYKFIKPILEKMDGTEELLVKLNREDLLRKQRTFDNGSIPHQIHLGELHAILRRQEDFYPFLKDNREKIEKILTFRIPYYVGPLARGNSRFAWMTRKSEETITPWNFEEVVDKGASAQSFIERMTNFDKNLPNEKVLPKHSLLYEYFTVYNELTKVKYVTEGMRKPAFLSGEQKKAIVDLLFKTNRKVTVKQLKEDYFKKIECFDSVEISGVEDRFNASLGTYHDLLKIIKDKDFLDNEENEDILEDIVLTLTLFEDREMIEERLKTYAHLFDDKVMKQLKRRRYTGWGRLSRKLINGIRDKQSGKTILDFLKSDGFANRNFMQLIHDDSLTFKEDIQKAQVSGQGDSLHEHIANLAGSPAIKKGILQTVKVVDELVKVMGRHKPENIVIEMARENQTTQKGQKNSRERMKRIEEGIKELGSQILKEHPVENTQLQNEKLYLYYLQNGRDMYVDQELDINRLSDYDVDHIVPQSFLKDDSIDNKVLTRSDKNRGKSDNVPSEEVVKKMKNYWRQLLNAKLITQRKFDNLTKAERGGLSELDKAGFIKRQLVETRQITKHVAQILDSRMNTKYDENDKLIREVKVITLKSKLVSDFRKDFQFYKVREINNYHHAHDAYLNAVVGTALIKKYPKLESEFVYGDYKVYDVRKMIAKSEQEIGKATAKYFFYSNIMNFFKTEITLANGEIRKRPLIETNGETGEIVWDKGRDFATVRKVLSMPQVNIVKKTEVQTGGFSKESILPKRNSDKLIARKKDWDPKKYGGFDSPTVAYSVLVVAKVEKGKSKKLKSVKELLGITIMERSSFEKNPIDFLEAKGYKEVKKDLIIKLPKYSLFELENGRKRMLASAGELQKGNELALPSKYVNFLYLASHYEKLKGSPGSSGSSGSETPGTSESATPESSGSEVEFSHEYWMRHALTLAKRARDEREVPVGAVLVLNNRVIGEGWNRAIGLHDPTAHAEIMALRQGGLVMQNYRLIDATLYVTFEPCVMCAGAMIHSRIGRVVFGVRNAKTGAAGSLMDVLHYPGMNHRVEITEGILADECAALLCYFFRMPREDNEQKQLFVEQHKHYLDEIIEQISEFSKRVILADANLDKVLSAYNKHRDKPIREQAENIIHLFTLTNLGAPAAFKYFDTTIDRKRYTSTKEVLDATLIHQSITGLYETRIDLSQLGGD

SEQ ID NO: 274 - protein, 1546 aa, synthetic construct
  REGION 1..1546: note = 110.3 Cas9 TadAins 1250 polypeptide sequence
MDKKYSIGLAIGTNSVGWAVITDEYKVPSKKFKVLGNTDRHSIKKNLIGALLFDSGETAEATRLKRTARRRYTRRKNRICYLQEIFSNEMAKVDDSFFHRLEESFLVEEDKKHERHPIFGNIVDEVAYHEKYPTIYHLRKKLVDSTDKADLRLIYLALAHMIKFRGHFLIEGDLNPDNSDVDKLFIQLVQTYNQLFEENPINASGVDAKAILSARLSKSRRLENLIAQLPGEKKNGLFGNLIALSLGLTPNFKSNFDLAEDAKLQLSKDTYDDDLDNLLAQIGDQYADLFLAAKNLSDAILLSDILRVNTEITKAPLSASMIKRYDEHHQDLTLLKALVRQQLPEKYKEIFFDQSKNGYAGYIDGGASQEEFYKFIKPILEKMDGTEELLVKLNREDLLRKQRTFDNGSIPHQIHLGELHAILRRQEDFYPFLKDNREKIEKILTFRIPYYVGPLARGNSRFAWMTRKSEETITPWNFEEVVDKGASAQSFIERMTNFDKNLPNEKVLPKHSLLYEYFTVYNELTKVKYVTEGMRKPAFLSGEQKKAIVDLLFKTNRKVTVKQLKEDYFKKIECFDSVEISGVEDRFNASLGTYHDLLKIIKDKDFLDNEENEDILEDIVLTLTLFEDREMIEERLKTYAHLFDDKVMKQLKRRRYTGWGRLSRKLINGIRDKQSGKTILDFLKSDGFANRNFMQLIHDDSLTFKEDIQKAQVSGQGDSLHEHIANLAGSPAIKKGILQTVKVVDELVKVMGRHKPENIVIEMARENQTTQKGQKNSRERMKRIEEGIKELGSQILKEHPVENTQLQNEKLYLYYLQNGRDMYVDQELDINRLSDYDVDHIVPQSFLKDDSIDNKVLTRSDKNRGKSDNVPSEEVVKKMKNYWRQLLNAKLITQRKFDNLTKAERGGLSELDKAGFIKRQLVETRQITKHVAQILDSRMNTKYDENDKLIREVKVITLKSKLVSDFRKDFQFYKVREINNYHHAHDAYLNAVVGTALIKKYPKLESEFVYGDYKVYDVRKMIAKSEQEIGKATAKYFFYSNIMNFFKTEITLANGEIRKRPLIETNGETGEIVWDKGRDFATVRKVLSMPQVNIVKKTEVQTGGFSKESILPKRNSDKLIARKKDWDPKKYGGFDSPTVAYSVLVVAKVEKGKSKKLKSVKELLGITIMERSSFEKNPIDFLEAKGYKEVKKDLIIKLPKYSLFELENGRKRMLASAGELQKGNELALPSKYVNFLYLASHYEKLKGSPGSSGSSGSETPGTSESATPESGSSSGSEVEFSHEYWMRHALTLAKRARDEREVPVGAVLVLNNRVIGEGWNRAIGLHDPTAHAEIMALRQGGLVMQNYRLIDATLYVTFEPCVMCAGAMIHSRIGRVVFGVRNAKTGAAGSLMDVLHYPGMNHRVEITEGILADECAALLCYFFRMPREDNEQKQLFVEQHKHYLDEIIEQISEFSKRVILADANLDKVLSAYNKHRDKPIREQAENIIHLFTLTNLGAPAAFKYFDTTIDRKRYTSTKEVLDATLIHQSITGLYETRIDLSQLGGD

SEQ ID NO: 275 - protein, 1546 aa, synthetic construct
  REGION 1..1546: note = 110.4 Cas9 TadAins 1250 polypeptide sequence
MDKKYSIGLAIGTNSVGWAVITDEYKVPSKKFKVLGNTDRHSIKKNLIGALLFDSGETAEATRLKRTARRRYTRRKNRICYLQEIFSNEMAKVDDSFFHRLEESFLVEEDKKHERHPIFGNIVDEVAYHEKYPTIYHLRKKLVDSTDKADLRLIYLALAHMIKFRGHFLIEGDLNPDNSDVDKLFIQLVQTYNQLFEENPINASGVDAKAILSARLSKSRRLENLIAQLPGEKKNGLFGNLIALSLGLTPNFKSNFDLAEDAKLQLSKDTYDDDLDNLLAQIGDQYADLFLAAKNLSDAILLSDILRVNTEITKAPLSASMIKRYDEHHQDLTLLKALVRQQLPEKYKEIFFDQSKNGYAGYIDGGASQEEFYKFIKPILEKMDGTEELLVKLNREDLLRKQRTFDNGSIPHQIHLGELHAILRRQEDFYPFLKDNREKIEKILTFRIPYYVGPLARGNSRFAWMTRKSEETITPWNFEEVVDKGASAQSFIERMTNFDKNLPNEKVLPKHSLLYEYFTVYNELTKVKYVTEGMRKPAFLSGEQKKAIVDLLFKTNRKVTVKQLKEDYFKKIECFDSVEISGVEDRFNASLGTYHDLLKIIKDKDFLDNEENEDILEDIVLTLTLFEDREMIEERLKTYAHLFDDKVMKQLKRRRYTGWGRLSRKLINGIRDKQSGKTILDFLKSDGFANRNFMQLIHDDSLTFKEDIQKAQVSGQGDSLHEHIANLAGSPAIKKGILQTVKVVDELVKVMGRHKPENIVIEMARENQTTQKGQKNSRERMKRIEEGIKELGSQILKEHPVENTQLQNEKLYLYYLQNGRDMYVDQELDINRLSDYDVDHIVPQSFLKDDSIDNKVLTRSDKNRGKSDNVPSEEVVKKMKNYWRQLLNAKLITQRKFDNLTKAERGGLSELDKAGFIKRQLVETRQITKHVAQILDSRMNTKYDENDKLIREVKVITLKSKLVSDFRKDFQFYKVREINNYHHAHDAYLNAVVGTALIKKYPKLESEFVYGDYKVYDVRKMIAKSEQEIGKATAKYFFYSNIMNFFKTEITLANGEIRKRPLIETNGETGEIVWDKGRDFATVRKVLSMPQVNIVKKTEVQTGGFSKESILPKRNSDKLIARKKDWDPKKYGGFDSPTVAYSVLVVAKVEKGKSKKLKSVKELLGITIMERSSFEKNPIDFLEAKGYKEVKKDLIIKLPKYSLFELENGRKRMLASAGELQKGNELALPSKYVNFLYLASHYEKLKGSPGSSGSSGSETPGTSESATPESGSSSGSEVEFSHEYWMRHALTLAKRARDEREVPVGAVLVLNNRVIGEGWNRAIGLHDPTAHAEIMALRQGGLVMQNYRLIDATLYVTFEPCVMCAGAMIHSRIGRVVFGVRNAKTGAAGSLMDVLHYPGMNHRVEITEGILADECAALLCYFFRMRREDNEQKQLFVEQHKHYLDEIIEQISEFSKRVILADANLDKVLSAYNKHRDKPIREQAENIIHLFTLTNLGAPAAFKYFDTTIDRKRYTSTKEVLDATLIHQSITGLYETRIDLSQLGGD

SEQ ID NO: 276 - protein, 1546 aa, synthetic construct
  REGION 1..1546: note = 110.5 Cas9 TadAins 1249 polypeptide sequence
MDKKYSIGLAIGTNSVGWAVITDEYKVPSKKFKVLGNTDRHSIKKNLIGALLFDSGETAEATRLKRTARRRYTRRKNRICYLQEIFSNEMAKVDDSFFHRLEESFLVEEDKKHERHPIFGNIVDEVAYHEKYPTIYHLRKKLVDSTDKADLRLIYLALAHMIKFRGHFLIEGDLNPDNSDVDKLFIQLVQTYNQLFEENPINASGVDAKAILSARLSKSRRLENLIAQLPGEKKNGLFGNLIALSLGLTPNFKSNFDLAEDAKLQLSKDTYDDDLDNLLAQIGDQYADLFLAAKNLSDAILLSDILRVNTEITKAPLSASMIKRYDEHHQDLTLLKALVRQQLPEKYKEIFFDQSKNGYAGYIDGGASQEEFYKFIKPILEKMDGTEELLVKLNREDLLRKQRTFDNGSIPHQIHLGELHAILRRQEDFYPFLKDNREKIEKILTFRIPYYVGPLARGNSRFAWMTRKSEETITPWNFEEVVDKGASAQSFIERMTNFDKNLPNEKVLPKHSLLYEYFTVYNELTKVKYVTEGMRKPAFLSGEQKKAIVDLLFKTNRKVTVKQLKEDYFKKIECFDSVEISGVEDRFNASLGTYHDLLKIIKDKDFLDNEENEDILEDIVLTLTLFEDREMIEERLKTYAHLFDDKVMKQLKRRRYTGWGRLSRKLINGIRDKQSGKTILDFLKSDGFANRNFMQLIHDDSLTFKEDIQKAQVSGQGDSLHEHIANLAGSPAIKKGILQTVKVVDELVKVMGRHKPENIVIEMARENQTTQKGQKNSRERMKRIEEGIKELGSQILKEHPVENTQLQNEKLYLYYLQNGRDMYVDQELDINRLSDYDVDHIVPQSFLKDDSIDNKVLTRSDKNRGKSDNVPSEEVVKKMKNYWRQLLNAKLITQRKFDNLTKAERGGLSELDKAGFIKRQLVETRQITKHVAQILDSRMNTKYDENDKLIREVKVITLKSKLVSDFRKDFQFYKVREINNYHHAHDAYLNAVVGTALIKKYPKLESEFVYGDYKVYDVRKMIAKSEQEIGKATAKYFFYSNIMNFFKTEITLANGEIRKRPLIETNGETGEIVWDKGRDFATVRKVLSMPQVNIVKKTEVQTGGFSKESILPKRNSDKLIARKKDWDPKKYGGFDSPTVAYSVLVVAKVEKGKSKKLKSVKELLGITIMERSSFEKNPIDFLEAKGYKEVKKDLIIKLPKYSLFELENGRKRMLASAGELQKGNELALPSKYVNFLYLASHYEKLKGSGSSGSSGSETPGTSESATPESGSSSGSEVEFSHEYWMRHALTLAKRARDEREVPVGAVLVLNNRVIGEGWNRAIGLHDPTAHAEIMALRQGGLVMQNYRLIDATLYVTFEPCVMCAGAMIHSRIGRVVFGVRNAKTGAAGSLMDVLHYPGMNHRVEITEGILADECAALLCYFFRMRRPEDNEQKQLFVEQHKHYLDEIIEQISEFSKRVILADANLDKVLSAYNKHRDKPIREQAENIIHLFTLTNLGAPAAFKYFDTTIDRKRYTSTKEVLDATLIHQSITGLYETRIDLSQLGGD

SEQ ID NO: 277 - protein, 1551 aa, synthetic construct
  REGION 1..1551: note = 110.5 Cas9 TadAins delta59-66 1250 polypeptide sequence
MDKKYSIGLAIGTNSVGWAVITDEYKVPSKKFKVLGNTDRHSIKKNLIGALLFDSGETAEATRLKRTARRRYTRRKNRICYLQEIFSNEMAKVDDSFFHRLEESFLVEEDKKHERHPIFGNIVDEVAYHEKYPTIYHLRKKLVDSTDKADLRLIYLALAHMIKFRGHFLIEGDLNPDNSDVDKLFIQLVQTYNQLFEENPINASGVDAKAILSARLSKSRRLENLIAQLPGEKKNGLFGNLIALSLGLTPNFKSNFDLAEDAKLQLSKDTYDDDLDNLLAQIGDQYADLFLAAKNLSDAILLSDILRVNTEITKAPLSASMIKRYDEHHQDLTLLKALVRQQLPEKYKEIFFDQSKNGYAGYIDGGASQEEFYKFIKPILEKMDGTEELLVKLNREDLLRKQRTFDNGSIPHQIHLGELHAILRRQEDFYPFLKDNREKIEKILTFRIPYYVGPLARGNSRFAWMTRKSEETITPWNFEEVVDKGASAQSFIERMTNFDKNLPNEKVLPKHSLLYEYFTVYNELTKVKYVTEGMRKPAFLSGEQKKAIVDLLFKTNRKVTVKQLKEDYFKKIECFDSVEISGVEDRFNASLGTYHDLLKIIKDKDFLDNEENEDILEDIVLTLTLFEDREMIEERLKTYAHLFDDKVMKQLKRRRYTGWGRLSRKLINGIRDKQSGKTILDFLKSDGFANRNFMQLIHDDSLTFKEDIQKAQVSGQGDSLHEHIANLAGSPAIKKGILQTVKVVDELVKVMGRHKPENIVIEMARENQTTQKGQKNSRERMKRIEEGIKELGSQILKEHPVENTQLQNEKLYLYYLQNGRDMYVDQELDINRLSDYDVDHIVPQSFLKDDSIDNKVLTRSDKNRGKSDNVPSEEVVKKMKNYWRQLLNAKLITQRKFDNLTKAERGGLSELDKAGFIKRQLVETRQITKHVAQILDSRMNTKYDENDKLIREVKVITLKSKLVSDFRKDFQFYKVREINNYHHAHDAYLNAVVGTALIKKYPKLESEFVYGDYKVYDVRKMIAKSEQEIGKATAKYFFYSNIMNFFKTEITLANGEIRKRPLIETNGETGEIVWDKGRDFATVRKVLSMPQVNIVKKTEVQTGGFSKESILPKRNSDKLIARKKDWDPKKYGGFDSPTVAYSVLVVAKVEKGKSKKLKSVKELLGITIMERSSFEKNPIDFLEAKGYKEVKKDLIIKLPKYSLFELENGRKRMLASAGELQKGNELALPSKYVNFLYLASHYEKLKGSPGSSGSSGSETPGTSESATPESGSSGSEVEFSHEYWMRHALTLAKRARDEREVPVGAVLVLNNRVIGEGWNRAHAEIMALRQGGLVMQNYRLIDATLYVTFEPCVMCAGAMIHSRIGRVVFGVRNAKTGAAGSLMDVLHYPGMNHRVEITEGILADECAALLCYFFRMPRQVFNAQKKAQSSTDEDNEQKQLFVEQHKHYLDEIIEQISEFSKRVILADANLDKVLSAYNKHRDKPIREQAENIIHLFTLTNLGAPAAFKYFDTTIDRKRYTSTKEVLDATLIHQSITGLYETRIDLSQLGGD

SEQ ID NO: 278 - protein, 1546 aa, synthetic construct
  REGION 1..1546: note = 110.6 Cas9 TadAins 1251 polypeptide sequence
MDKKYSIGLAIGTNSVGWAVITDEYKVPSKKFKVLGNTDRHSIKKNLIGALLFDSGETAEATRLKRTARRRYTRRKNRICYLQEIFSNEMAKVDDSFFHRLEESFLVEEDKKHERHPIFGNIVDEVAYHEKYPTIYHLRKKLVDSTDKADLRLIYLALAHMIKFRGHFLIEGDLNPDNSDVDKLFIQLVQTYNQLFEENPINASGVDAKAILSARLSKSRRLENLIAQLPGEKKNGLFGNLIALSLGLTPNFKSNFDLAEDAKLQLSKDTYDDDLDNLLAQIGDQYADLFLAAKNLSDAILLSDILRVNTEITKAPLSASMIKRYDEHHQDLTLLKALVRQQLPEKYKEIFFDQSKNGYAGYIDGGASQEEFYKFIKPILEKMDGTEELLVKLNREDLLRKQRTFDNGSIPHQIHLGELHAILRRQEDFYPFLKDNREKIEKILTFRIPYYVGPLARGNSRFAWMTRKSEETITPWNFEEVVDKGASAQSFIERMTNFDKNLPNEKVLPKHSLLYEYFTVYNELTKVKYVTEGMRKPAFLSGEQKKAIVDLLFKTNRKVTVKQLKEDYFKKIECFDSVEISGVEDRFNASLGTYHDLLKIIKDKDFLDNEENEDILEDIVLTLTLFEDREMIEERLKTYAHLFDDKVMKQLKRRRYTGWGRLSRKLINGIRDKQSGKTILDFLKSDGFANRNFMQLIHDDSLTFKEDIQKAQVSGQGDSLHEHIANLAGSPAIKKGILQTVKVVDELVKVMGRHKPENIVIEMARENQTTQKGQKNSRERMKRIEEGIKELGSQILKEHPVENTQLQNEKLYLYYLQNGRDMYVDQELDINRLSDYDVDHIVPQSFLKDDSIDNKVLTRSDKNRGKSDNVPSEEVVKKMKNYWRQLLNAKLITQRKFDNLTKAERGGLSELDKAGFIKRQLVETRQITKHVAQILDSRMNTKYDENDKLIREVKVITLKSKLVSDFRKDFQFYKVREINNYHHAHDAYLNAVVGTALIKKYPKLESEFVYGDYKVYDVRKMIAKSEQEIGKATAKYFFYSNIMNFFKTEITLANGEIRKRPLIETNGETGEIVWDKGRDFATVRKVLSMPQVNIVKKTEVQTGGFSKESILPKRNSDKLIARKKDWDPKKYGGFDSPTVAYSVLVVAKVEKGKSKKLKSVKELLGITIMERSSFEKNPIDFLEAKGYKEVKKDLIIKLPKYSLFELENGRKRMLASAGELQKGNELALPSKYVNFLYLASHYEKLKGSPEGSSGSSGSETPGTSESATPESGSSSGSEVEFSHEYWMRHALTLAKRARDEREVPVGAVLVLNNRVIGEGWNRAIGLHDPTAHAEIMALRQGGLVMQNYRLIDATLYVTFEPCVMCAGAMIHSRIGRVVFGVRNAKTGAAGSLMDVLHYPGMNHRVEITEGILADECAALLCYFFRMRRDNEQKQLFVEQHKHYLDEIIEQISEFSKRVILADANLDKVLSAYNKHRDKPIREQAENIIHLFTLTNLGAPAAFKYFDTTIDRKRYTSTKEVLDATLIHQSITGLYETRIDLSQLGGD

SEQ ID NO: 279 - protein, 1546 aa, synthetic construct
  REGION 1..1546: note = 110.7 Cas9 TadAins 1252 polypeptide sequence
MDKKYSIGLAIGTNSVGWAVITDEYKVPSKKFKVLGNTDRHSIKKNLIGALLFDSGETAEATRLKRTARRRYTRRKNRICYLQEIFSNEMAKVDDSFFHRLEESFLVEEDKKHERHPIFGNIVDEVAYHEKYPTIYHLRKKLVDSTDKADLRLIYLALAHMIKFRGHFLIEGDLNPDNSDVDKLFIQLVQTYNQLFEENPINASGVDAKAILSARLSKSRRLENLIAQLPGEKKNGLFGNLIALSLGLTPNFKSNFDLAEDAKLQLSKDTYDDDLDNLLAQIGDQYADLFLAAKNLSDAILLSDILRVNTEITKAPLSASMIKRYDEHHQDLTLLKALVRQQLPEKYKEIFFDQSKNGYAGYIDGGASQEEFYKFIKPILEKMDGTEELLVKLNREDLLRKQRTFDNGSIPHQIHLGELHAILRRQEDFYPFLKDNREKIEKILTFRIPYYVGPLARGNSRFAWMTRKSEETITPWNFEEVVDKGASAQSFIERMTNFDKNLPNEKVLPKHSLLYEYFTVYNELTKVKYVTEGMRKPAFLSGEQKKAIVDLLFKTNRKVTVKQLKEDYFKKIECFDSVEISGVEDRFNASLGTYHDLLKIIKDKDFLDNEENEDILEDIVLTLTLFEDREMIEERLKTYAHLFDDKVMKQLKRRRYTGWGRLSRKLINGIRDKQSGKTILDFLKSDGFANRNFMQLIHDDSLTFKEDIQKAQVSGQGDSLHEHIANLAGSPAIKKGILQTVKVVDELVKVMGRHKPENIVIEMARENQTTQKGQKNSRERMKRIEEGIKELGSQILKEHPVENTQLQNEKLYLYYLQNGRDMYVDQELDINRLSDYDVDHIVPQSFLKDDSIDNKVLTRSDKNRGKSDNVPSEEVVKKMKNYWRQLLNAKLITQRKFDNLTKAERGGLSELDKAGFIKRQLVETRQITKHVAQILDSRMNTKYDENDKLIREVKVITLKSKLVSDFRKDFQFYKVREINNYHHAHDAYLNAVVGTALIKKYPKLESEFVYGDYKVYDVRKMIAKSEQEIGKATAKYFFYSNIMNFFKTEITLANGEIRKRPLIETNGETGEIVWDKGRDFATVRKVLSMPQVNIVKKTEVQTGGFSKESILPKRNSDKLIARKKDWDPKKYGGFDSPTVAYSVLVVAKVEKGKSKKLKSVKELLGITIMERSSFEKNPIDFLEAKGYKEVKKDLIIKLPKYSLFELENGRKRMLASAGELQKGNELALPSKYVNFLYLASHYEKLKGSPEDGSSGSSGSETPGTSESATPESGSSSGSEVEFSHEYWMRHALTLAKRARDEREVPVGAVLVLNNRVIGEGWNRAIGLHDPTAHAEIMALRQGGLVMQNYRLIDATLYVTFEPCVMCAGAMIHSRIGRVVFGVRNAKTGAAGSLMDVLHYPGMNHRVEITEGILADECAALLCYFFRMRRNEQKQLFVEQHKHYLDEIIEQISEFSKRVILADANLDKVLSAYNKHRDKPIREQAENIIHLFTLTNLGAPAAFKYFDTTIDRKRYTSTKEVLDATLIHQSITGLYETRIDLSQLGGD

SEQ ID NO: 280 - protein, 1533 aa, synthetic construct
  REGION 1..1533: note = 110.8 Cas9 TadAins delta59-66 C-truncate 1250 polypeptide sequence
MDKKYSIGLAIGTNSVGWAVITDEYKVPSKKFKVLGNTDRHSIKKNLIGALLFDSGETAEATRLKRTARRRYTRRKNRICYLQEIFSNEMAKVDDSFFHRLEESFLVEEDKKHERHPIFGNIVDEVAYHEKYPTIYHLRKKLVDSTDKADLRLIYLALAHMIKFRGHFLIEGDLNPDNSDVDKLFIQLVQTYNQLFEENPINASGVDAKAILSARLSKSRRLENLIAQLPGEKKNGLFGNLIALSLGLTPNFKSNFDLAEDAKLQLSKDTYDDDLDNLLAQIGDQYADLFLAAKNLSDAILLSDILRVNTEITKAPLSASMIKRYDEHHQDLTLLKALVRQQLPEKYKEIFFDQSKNGYAGYIDGGASQEEFYKFIKPILEKMDGTEELLVKLNREDLLRKQRTFDNGSIPHQIHLGELHAILRRQEDFYPFLKDNREKIEKILTFRIPYYVGPLARGNSRFAWMTRKSEETITPWNFEEVVDKGASAQSFIERMTNFDKNLPNEKVLPKHSLLYEYFTVYNELTKVKYVTEGMRKPAFLSGEQKKAIVDLLFKTNRKVTVKQLKEDYFKKIECFDSVEISGVEDRFNASLGTYHDLLKIIKDKDFLDNEENEDILEDIVLTLTLFEDREMIEERLKTYAHLFDDKVMKQLKRRRYTGWGRLSRKLINGIRDKQSGKTILDFLKSDGFANRNFMQLIHDDSLTFKEDIQKAQVSGQGDSLHEHIANLAGSPAIKKGILQTVKVVDELVKVMGRHKPENIVIEMARENQTTQKGQKNSRERMKRIEEGIKELGSQILKEHPVENTQLQNEKLYLYYLQNGRDMYVDQELDINRLSDYDVDHIVPQSFLKDDSIDNKVLTRSDKNRGKSDNVPSEEVVKKMKNYWRQLLNAKLITQRKFDNLTKAERGGLSELDKAGFIKRQLVETRQITKHVAQILDSRMNTKYDENDKLIREVKVITLKSKLVSDFRKDFQFYKVREINNYHHAHDAYLNAVVGTALIKKYPKLESEFVYGDYKVYDVRKMIAKSEQEIGKATAKYFFYSNIMNFFKTEITLANGEIRKRPLIETNGETGEIVWDKGRDFATVRKVLSMPQVNIVKKTEVQTGGFSKESILPKRNSDKLIARKKDWDPKKYGGFDSPTVAYSVLVVAKVEKGKSKKLKSVKELLGITIMERSSFEKNPIDFLEAKGYKEVKKDLIIKLPKYSLFELENGRKRMLASAGELQKGNELALPSKYVNFLYLASHYEKLKGSPGSSGSETPGTSESATPESSGSEVEFSHEYWMRHALTLAKRARDEREVPVGAVLVLNNRVIGEGWNRAHAEIMALRQGGLVMQNYRLIDATLYVTFEPCVMCAGAMIHSRIGRVVFGVRNAKTGAAGSLMDVLHYPGMNHRVEITEGILADECAALLCYFFRMPRQEDNEQKQLFVEQHKHYLDEIIEQISEFSKRVILADANLDKVLSAYNKHRDKPIREQAENIIHLFTLTNLGAPAAFKYFDTTIDRKRYTSTKEVLDATLIHQSITGLYETRIDLSQLGGD

SEQ ID NO: 281 - protein, 1549 aa, synthetic construct
  REGION 1..1549: note = 111.1 Cas9 TadAins 997 polypeptide sequence
MDKKYSIGLAIGTNSVGWAVITDEYKVPSKKFKVLGNTDRHSIKKNLIGALLFDSGETAEATRLKRTARRRYTRRKNRICYLQEIFSNEMAKVDDSFFHRLEESFLVEEDKKHERHPIFGNIVDEVAYHEKYPTIYHLRKKLVDSTDKADLRLIYLALAHMIKFRGHFLIEGDLNPDNSDVDKLFIQLVQTYNQLFEENPINASGVDAKAILSARLSKSRRLENLIAQLPGEKKNGLFGNLIALSLGLTPNFKSNFDLAEDAKLQLSKDTYDDDLDNLLAQIGDQYADLFLAAKNLSDAILLSDILRVNTEITKAPLSASMIKRYDEHHQDLTLLKALVRQQLPEKYKEIFFDQSKNGYAGYIDGGASQEEFYKFIKPILEKMDGTEELLVKLNREDLLRKQRTFDNGSIPHQIHLGELHAILRRQEDFYPFLKDNREKIEKILTFRIPYYVGPLARGNSRFAWMTRKSEETITPWNFEEVVDKGASAQSFIERMTNFDKNLPNEKVLPKHSLLYEYFTVYNELTKVKYVTEGMRKPAFLSGEQKKAIVDLLFKTNRKVTVKQLKEDYFKKIECFDSVEISGVEDRFNASLGTYHDLLKIIKDKDFLDNEENEDILEDIVLTLTLFEDREMIEERLKTYAHLFDDKVMKQLKRRRYTGWGRLSRKLINGIRDKQSGKTILDFLKSDGFANRNFMQLIHDDSLTFKEDIQKAQVSGQGDSLHEHIANLAGSPAIKKGILQTVKVVDELVKVMGRHKPENIVIEMARENQTTQKGQKNSRERMKRIEEGIKELGSQILKEHPVENTQLQNEKLYLYYLQNGRDMYVDQELDINRLSDYDVDHIVPQSFLKDDSIDNKVLTRSDKNRGKSDNVPSEEVVKKMKNYWRQLLNAKLITQRKFDNLTKAERGGLSELDKAGFIKRQLVETRQITKHVAQILDSRMNTKYDENDKLIREVKVITLKSKLVSDFRKDFQFYKVREINNYHHAHDAYLNAVVGTALSHEYWMRHALTLAKRARDEREVPVGAVLVLNNRVIGEGWNRAIGLHDPTAHAEIMALRQGGLVMQNYRLIDATLYVTFEPCVMCAGAMIHSRIGRVVFGVRNAKTGAAGSLMDVLHYPGMNHRVEITEGILADECAALLCYFFRMPRQVFNAQKKAQSSTDGSSGSETPGTSESATPESSGIKKYPKLESEFVYGDYKVYDVRKMIAKSEQEIGKATAKYFFYSNIMNFFKTEITLANGEIRKRPLIETNGETGEIVWDKGRDFATVRKVLSMPQVNIVKKTEVQTGGFSKESILPKRNSDKLIARKKDWDPKKYGGFDSPTVAYSVLVVAKVEKGKSKKLKSVKELLGITIMERSSFEKNPIDFLEAKGYKEVKKDLIIKLPKYSLFELENGRKRMLASAGELQKGNELALPSKYVNFLYLASHYEKLKGSPEDNEQKQLFVEQHKHYLDEIIEQISEFSKRVILADANLDKVLSAYNKHRDKPIREQAENIIHLFTLTNLGAPAAFKYFDTTIDRKRYTSTKEVLDATLIHQSITGLYETRIDLSQLGGD

SEQ ID NO: 282 - protein, 1555 aa, synthetic construct
  REGION 1..1555: note = 111.2 Cas9 TadAins 997 polypeptide sequence
MDKKYSIGLAIGTNSVGWAVITDEYKVPSKKFKVLGNTDRHSIKKNLIGALLFDSGETAEATRLKRTARRRYTRRKNRICYLQEIFSNEMAKVDDSFFHRLEESFLVEEDKKHERHPIFGNIVDEVAYHEKYPTIYHLRKKLVDSTDKADLRLIYLALAHMIKFRGHFLIEGDLNPDNSDVDKLFIQLVQTYNQLFEENPINASGVDAKAILSARLSKSRRLENLIAQLPGEKKNGLFGNLIALSLGLTPNFKSNFDLAEDAKLQLSKDTYDDDLDNLLAQIGDQYADLFLAAKNLSDAILLSDILRVNTEITKAPLSASMIKRYDEHHQDLTLLKALVRQQLPEKYKEIFFDQSKNGYAGYIDGGASQEEFYKFIKPILEKMDGTEELLVKLNREDLLRKQRTFDNGSIPHQIHLGELHAILRRQEDFYPFLKDNREKIEKILTFRIPYYVGPLARGNSRFAWMTRKSEETITPWNFEEVVDKGASAQSFIERMTNFDKNLPNEKVLPKHSLLYEYFTVYNELTKVKYVTEGMRKPAFLSGEQKKAIVDLLFKTNRKVTVKQLKEDYFKKIECFDSVEISGVEDRFNASLGTYHDLLKIIKDKDFLDNEENEDILEDIVLTLTLFEDREMIEERLKTYAHLFDDKVMKQLKRRRYTGWGRLSRKLINGIRDKQSGKTILDFLKSDGFANRNFMQLIHDDSLTFKEDIQKAQVSGQGDSLHEHIANLAGSPAIKKGILQTVKVVDELVKVMGRHKPENIVIEMARENQTTQKGQKNSRERMKRIEEGIKELGSQILKEHPVENTQLQNEKLYLYYLQNGRDMYVDQELDINRLSDYDVDHIVPQSFLKDDSIDNKVLTRSDKNRGKSDNVPSEEVVKKMKNYWRQLLNAKLITQRKFDNLTKAERGGLSELDKAGFIKRQLVETRQITKHVAQILDSRMNTKYDENDKLIREVKVITLKSKLVSDFRKDFQFYKVREINNYHHAHDAYLNAVVGTALSHEYWMRHALTLAKRARDEREVPVGAVLVLNNRVIGEGWNRAIGLHDPTAHAEIMALRQGGLVMQNYRLIDATLYVTFEPCVMCAGAMIHSRIGRVVFGVRNAKTGAAGSLMDVLHYPGMNHRVEITEGILADECAALLCYFFRMPRQVFNAQKKAQSSTDGSSGSSGSETPGTSESATPESSGGSSIKKYPKLESEFVYGDYKVYDVRKMIAKSEQEIGKATAKYFFYSNIMNFFKTEITLANGEIRKRPLIETNGETGEIVWDKGRDFATVRKVLSMPQVNIVKKTEVQTGGFSKESILPKRNSDKLIARKKDWDPKKYGGFDSPTVAYSVLVVAKVEKGKSKKLKSVKELLGITIMERSSFEKNPIDFLEAKGYKEVKKDLIIKLPKYSLFELENGRKRMLASAGELQKGNELALPSKYVNFLYLASHYEKLKGSPEDNEQKQLFVEQHKHYLDEIIEQISEFSKRVILADANLDKVLSAYNKHRDKPIREQAENIIHLFTLTNLGAPAAFKYFDTTIDRKRYTSTKEVLDATLIHQSITGLYETRIDLSQLGGD

SEQ ID NO: 283 - protein, 1421 aa, synthetic construct
  REGION 1..1421: note = 112 delta HNH TadA polypeptide sequence
MDKKYSIGLAIGTNSVGWAVITDEYKVPSKKFKVLGNTDRHSIKKNLIGALLFDSGETAEATRLKRTARRRYTRRKNRICYLQEIFSNEMAKVDDSFFHRLEESFLVEEDKKHERHPIFGNIVDEVAYHEKYPTIYHLRKKLVDSTDKADLRLIYLALAHMIKFRGHFLIEGDLNPDNSDVDKLFIQLVQTYNQLFEENPINASGVDAKAILSARLSKSRRLENLIAQLPGEKKNGLFGNLIALSLGLTPNFKSNFDLAEDAKLQLSKDTYDDDLDNLLAQIGDQYADLFLAAKNLSDAILLSDILRVNTEITKAPLSASMIKRYDEHHQDLTLLKALVRQQLPEKYKEIFFDQSKNGYAGYIDGGASQEEFYKFIKPILEKMDGTEELLVKLNREDLLRKQRTFDNGSIPHQIHLGELHAILRRQEDFYPFLKDNREKIEKILTFRIPYYVGPLARGNSRFAWMTRKSEETITPWNFEEVVDKGASAQSFIERMTNFDKNLPNEKVLPKHSLLYEYFTVYNELTKVKYVTEGMRKPAFLSGEQKKAIVDLLFKTNRKVTVKQLKEDYFKKIECFDSVEISGVEDRFNASLGTYHDLLKIIKDKDFLDNEENEDILEDIVLTLTLFEDREMIEERLKTYAHLFDDKVMKQLKRRRYTGWGRLSRKLINGIRDKQSGKTILDFLKSDGFANRNFMQLIHDDSLTFKEDIQKAQVSGQGDSLHEHIANLAGSPAIKKGILQTVKVVDELVKVMGRHKPENIVIEMARENQTTQKGQKNSRERMKRIEEGIKELGSEVEFSHEYWMRHALTLAKRARDEREVPVGAVLVLNNRVIGEGWNRAIGLHDPTAHAEIMALRQGGLVMQNYRLIDATLYVTFEPCVMCAGAMIHSRIGRVVFGVRNAKTGAAGSLMDVLHYPGMNHRVEITEGILADECAALLCYFFRMPRQVFNAQKKAQSSTDGGLSELDKAGFIKRQLVETRQITKHVAQILDSRMNTKYDENDKLIREVKVITLKSKLVSDFRKDFQFYKVREINNYHHAHDAYLNAVVGTALIKKYPKLESEFVYGDYKVYDVRKMIAKSEQEIGKATAKYFFYSNIMNFFKTEITLANGEIRKRPLIETNGETGEIVWDKGRDFATVRKVLSMPQVNIVKKTEVQTGGFSKESILPKRNSDKLIARKKDWDPKKYGGFDSPTVAYSVLVVAKVEKGKSKKLKSVKELLGITIMERSSFEKNPIDFLEAKGYKEVKKDLIIKLPKYSLFELENGRKRMLASAGELQKGNELALPSKYVNFLYLASHYEKLKGSPEDNEQKQLFVEQHKHYLDEIIEQISEFSKRVILADANLDKVLSAYNKHRDKPIREQAENIIHLFTLTNLGAPAAFKYFDTTIDRKRYTSTKEVLDATLIHQSITGLYETRIDLSQLGGD

SEQ ID NO: 284 - protein, 1552 aa, synthetic construct
  REGION 1..1552: note = 113 N-term single TadA helixtrunc 165-end polypeptide sequence
MSEVEFSHEYWMRHALTLAKRARDEREVPVGAVLVLNNRVIGEGWNRAIGLHDPTAHAEIMALRQGGLVMQNYRLIDATLYVTFEPCVMCAGAMIHSRIGRVVFGVRNAKTGAAGSLMDVLHYPGMNHRVEITEGILADECAALLCYFFRMPRSGGSSGGSSGSETPGTSESATPESSGGSSGGSDKKYSIGLAIGTNSVGWAVITDEYKVPSKKFKVLGNTDRHSIKKNLIGALLFDSGETAEATRLKRTARRRYTRRKNRICYLQEIFSNEMAKVDDSFFHRLEESFLVEEDKKHERHPIFGNIVDEVAYHEKYPTIYHLRKKLVDSTDKADLRLIYLALAHMIKFRGHFLIEGDLNPDNSDVDKLFIQLVQTYNQLFEENPINASGVDAKAILSARLSKSRRLENLIAQLPGEKKNGLFGNLIALSLGLTPNFKSNFDLAEDAKLQLSKDTYDDDLDNLLAQIGDQYADLFLAAKNLSDAILLSDILRVNTEITKAPLSASMIKRYDEHHQDLTLLKALVRQQLPEKYKEIFFDQSKNGYAGYIDGGASQEEFYKFIKPILEKMDGTEELLVKLNREDLLRKQRTFDNGSIPHQIHLGELHAILRRQEDFYPFLKDNREKIEKILTFRIPYYVGPLARGNSRFAWMTRKSEETITPWNFEEVVDKGASAQSFIERMTNFDKNLPNEKVLPKHSLLYEYFTVYNELTKVKYVTEGMRKPAFLSGEQKKAIVDLLFKTNRKVTVKQLKEDYFKKIECFDSVEISGVEDRFNASLGTYHDLLKIIKDKDFLDNEENEDILEDIVLTLTLFEDREMIEERLKTYAHLFDDKVMKQLKRRRYTGWGRLSRKLINGIRDKQSGKTILDFLKSDGFANRNFMQLIHDDSLTFKEDIQKAQVSGQGDSLHEHIANLAGSPAIKKGILQTVKVVDELVKVMGRHKPENIVIEMARENQTTQKGQKNSRERMKRIEEGIKELGSQILKEHPVENTQLQNEKLYLYYLQNGRDMYVDQELDINRLSDYDVDHIVPQSFLKDDSIDNKVLTRSDKNRGKSDNVPSEEVVKKMKNYWRQLLNAKLITQRKFDNLTKAERGGLSELDKAGFIKRQLVETRQITKHVAQILDSRMNTKYDENDKLIREVKVITLKSKLVSDFRKDFQFYKVREINNYHHAHDAYLNAVVGTALIKKYPKLESEFVYGDYKVYDVRKMIAKSEQEIGKATAKYFFYSNIMNFFKTEITLANGEIRKRPLIETNGETGEIVWDKGRDFATVRKVLSMPQVNIVKKTEVQTGGFSKESILPKRNSDKLIARKKDWDPKKYGGFDSPTVAYSVLVVAKVEKGKSKKLKSVKELLGITIMERSSFEKNPIDFLEAKGYKEVKKDLIIKLPKYSLFELENGRKRMLASAGELQKGNELALPSKYVNFLYLASHYEKLKGSPEDNEQKQLFVEQHKHYLDEIIEQISEFSKRVILADANLDKVLSAYNKHRDKPIREQAENIIHLFTLTNLGAPAAFKYFDTTIDRKRYTSTKEVLDATLIHQSITGLYETRIDLSQLGGD

SEQ ID NO: 285 - protein, 1545 aa, synthetic construct
  REGION 1..1545: note = 114 N-term single TadA helixtrunc 165-end delta 59-65 polypeptide sequence
MSEVEFSHEYWMRHALTLAKRARDEREVPVGAVLVLNNRVIGEGWNRTAHAEIMALRQGGLVMQNYRLIDATLYVTFEPCVMCAGAMIHSRIGRVVFGVRNAKTGAAGSLMDVLHYPGMNHRVEITEGILADECAALLCYFFRMPRSGGSSGGSSGSETPGTSESATPESSGGSSGGSDKKYSIGLAIGTNSVGWAVITDEYKVPSKKFKVLGNTDRHSIKKNLIGALLFDSGETAEATRLKRTARRRYTRRKNRICYLQEIFSNEMAKVDDSFFHRLEESFLVEEDKKHERHPIFGNIVDEVAYHEKYPTIYHLRKKLVDSTDKADLRLIYLALAHMIKFRGHFLIEGDLNPDNSDVDKLFIQLVQTYNQLFEENPINASGVDAKAILSARLSKSRRLENLIAQLPGEKKNGLFGNLIALSLGLTPNFKSNFDLAEDAKLQLSKDTYDDDLDNLLAQIGDQYADLFLAAKNLSDAILLSDILRVNTEITKAPLSASMIKRYDEHHQDLTLLKALVRQQLPEKYKEIFFDQSKNGYAGYIDGGASQEEFYKFIKPILEKMDGTEELLVKLNREDLLRKQRTFDNGSIPHQIHLGELHAILRRQEDFYPFLKDNREKIEKILTFRIPYYVGPLARGNSRFAWMTRKSEETITPWNFEEVVDKGASAQSFIERMTNFDKNLPNEKVLPKHSLLYEYFTVYNELTKVKYVTEGMRKPAFLSGEQKKAIVDLLFKTNRKVTVKQLKEDYFKKIECFDSVEISGVEDRFNASLGTYHDLLKIIKDKDFLDNEENEDILEDIVLTLTLFEDREMIEERLKTYAHLFDDKVMKQLKRRRYTGWGRLSRKLINGIRDKQSGKTILDFLKSDGFANRNFMQLIHDDSLTFKEDIQKAQVSGQGDSLHEHIANLAGSPAIKKGILQTVKVVDELVKVMGRHKPENIVIEMARENQTTQKGQKNSRERMKRIEEGIKELGSQILKEHPVENTQLQNEKLYLYYLQNGRDMYVDQELDINRLSDYDVDHIVPQSFLKDDSIDNKVLTRSDKNRGKSDNVPSEEVVKKMKNYWRQLLNAKLITQRKFDNLTKAERGGLSELDKAGFIKRQLVETRQITKHVAQILDSRMNTKYDENDKLIREVKVITLKSKLVSDFRKDFQFYKVREINNYHHAHDAYLNAVVGTALIKKYPKLESEFVYGDYKVYDVRKMIAKSEQEIGKATAKYFFYSNIMNFFKTEITLANGEIRKRPLIETNGETGEIVWDKGRDFATVRKVLSMPQVNIVKKTEVQTGGFSKESILPKRNSDKLIARKKDWDPKKYGGFDSPTVAYSVLVVAKVEKGKSKKLKSVKELLGITIMERSSFEKNPIDFLEAKGYKEVKKDLIIKLPKYSLFELENGRKRMLASAGELQKGNELALPSKYVNFLYLASHYEKLKGSPEDNEQKQLFVEQHKHYLDEIIEQISEFSKRVILADANLDKVLSAYNKHRDKPIREQAENIIHLFTLTNLGAPAAFKYFDTTIDRKRYTSTKEVLDATLIHQSITGLYETRIDLSQLGGD

SEQ ID NO: 286 - protein, 1541 aa, synthetic construct
  REGION 1..1541: note = 115.1 Cas9 TadAins 1004 polypeptide sequence
MDKKYSIGLAIGTNSVGWAVITDEYKVPSKKFKVLGNTDRHSIKKNLIGALLFDSGETAEATRLKRTARRRYTRRKNRICYLQEIFSNEMAKVDDSFFHRLEESFLVEEDKKHERHPIFGNIVDEVAYHEKYPTIYHLRKKLVDSTDKADLRLIYLALAHMIKFRGHFLIEGDLNPDNSDVDKLFIQLVQTYNQLFEENPINASGVDAKAILSARLSKSRRLENLIAQLPGEKKNGLFGNLIALSLGLTPNFKSNFDLAEDAKLQLSKDTYDDDLDNLLAQIGDQYADLFLAAKNLSDAILLSDILRVNTEITKAPLSASMIKRYDEHHQDLTLLKALVRQQLPEKYKEIFFDQSKNGYAGYIDGGASQEEFYKFIKPILEKMDGTEELLVKLNREDLLRKQRTFDNGSIPHQIHLGELHAILRRQEDFYPFLKDNREKIEKILTFRIPYYVGPLARGNSRFAWMTRKSEETITPWNFEEVVDKGASAQSFIERMTNFDKNLPNEKVLPKHSLLYEYFTVYNELTKVKYVTEGMRKPAFLSGEQKKAIVDLLFKTNRKVTVKQLKEDYFKKIECFDSVEISGVEDRFNASLGTYHDLLKIIKDKDFLDNEENEDILEDIVLTLTLFEDREMIEERLKTYAHLFDDKVMKQLKRRRYTGWGRLSRKLINGIRDKQSGKTILDFLKSDGFANRNFMQLIHDDSLTFKEDIQKAQVSGQGDSLHEHIANLAGSPAIKKGILQTVKVVDELVKVMGRHKPENIVIEMARENQTTQKGQKNSRERMKRIEEGIKELGSQILKEHPVENTQLQNEKLYLYYLQNGRDMYVDQELDINRLSDYDVDHIVPQSFLKDDSIDNKVLTRSDKNRGKSDNVPSEEVVKKMKNYWRQLLNAKLITQRKFDNLTKAERGGLSELDKAGFIKRQLVETRQITKHVAQILDSRMNTKYDENDKLIREVKVITLKSKLVSDFRKDFQFYKVREINNYHHAHDAYLNAVVGTALIKKYPKGSSGSETPGTSESATPESSGSEVEFSHEYWMRHALTLAKRARDEREVPVGAVLVLNNRVIGEGWNRAIGLHDPTAHAEIMALRQGGLVMQNYRLIDATLYVTFEPCVMCAGAMIHSRIGRVVFGVRNAKTGAAGSLMDVLHYPGMNHRVEITEGILADECAALLCYFFRMPRQLESEFVYGDYKVYDVRKMIAKSEQEIGKATAKYFFYSNIMNFFKTEITLANGEIRKRPLIETNGETGEIVWDKGRDFATVRKVLSMPQVNIVKKTEVQTGGFSKESILPKRNSDKLIARKKDWDPKKYGGFDSPTVAYSVLVVAKVEKGKSKKLKSVKELLGITIMERSSFEKNPIDFLEAKGYKEVKKDLIIKLPKYSLFELENGRKRMLASAGELQKGNELALPSKYVNFLYLASHYEKLKGSPEDNEQKQLFVEQHKHYLDEIIEQISEFSKRVILADANLDKVLSAYNKHRDKPIREQAENIIHLFTLTNLGAPAAFKYFDTTIDRKRYTSTKEVLDATLIHQSITGLYETRIDLSQLGGD

SEQ ID NO: 287 - protein, 1541 aa, synthetic construct
  REGION 1..1541: note = 115.2 Cas9 TadAins 1005 polypeptide sequence
MDKKYSIGLAIGTNSVGWAVITDEYKVPSKKFKVLGNTDRHSIKKNLIGALLFDSGETAEATRLKRTARRRYTRRKNRICYLQEIFSNEMAKVDDSFFHRLEESFLVEEDKKHERHPIFGNIVDEVAYHEKYPTIYHLRKKLVDSTDKADLRLIYLALAHMIKFRGHFLIEGDLNPDNSDVDKLFIQLVQTYNQLFEENPINASGVDAKAILSARLSKSRRLENLIAQLPGEKKNGLFGNLIALSLGLTPNFKSNFDLAEDAKLQLSKDTYDDDLDNLLAQIGDQYADLFLAAKNLSDAILLSDILRVNTEITKAPLSASMIKRYDEHHQDLTLLKALVRQQLPEKYKEIFFDQSKNGYAGYIDGGASQEEFYKFIKPILEKMDGTEELLVKLNREDLLRKQRTFDNGSIPHQIHLGELHAILRRQEDFYPFLKDNREKIEKILTFRIPYYVGPLARGNSRFAWMTRKSEETITPWNFEEVVDKGASAQSFIERMTNFDKNLPNEKVLPKHSLLYEYFTVYNELTKVKYVTEGMRKPAFLSGEQKKAIVDLLFKTNRKVTVKQLKEDYFKKIECFDSVEISGVEDRFNASLGTYHDLLKIIKDKDFLDNEENEDILEDIVLTLTLFEDREMIEERLKTYAHLFDDKVMKQLKRRRYTGWGRLSRKLINGIRDKQSGKTILDFLKSDGFANRNFMQLIHDDSLTFKEDIQKAQVSGQGDSLHEHIANLAGSPAIKKGILQTVKVVDELVKVMGRHKPENIVIEMARENQTTQKGQKNSRERMKRIEEGIKELGSQILKEHPVENTQLQNEKLYLYYLQNGRDMYVDQELDINRLSDYDVDHIVPQSFLKDDSIDNKVLTRSDKNRGKSDNVPSEEVVKKMKNYWRQLLNAKLITQRKFDNLTKAERGGLSELDKAGFIKRQLVETRQITKHVAQILDSRMNTKYDENDKLIREVKVITLKSKLVSDFRKDFQFYKVREINNYHHAHDAYLNAVVGTALIKKYPKLGSSGSETPGTSESATPESSGSEVEFSHEYWMRHALTLAKRARDEREVPVGAVLVLNNRVIGEGWNRAIGLHDPTAHAEIMALRQGGLVMQNYRLIDATLYVTFEPCVMCAGAMIHSRIGRVVFGVRNAKTGAAGSLMDVLHYPGMNHRVEITEGILADECAALLCYFFRMPRQESEFVYGDYKVYDVRKMIAKSEQEIGKATAKYFFYSNIMNFFKTEITLANGEIRKRPLIETNGETGEIVWDKGRDFATVRKVLSMPQVNIVKKTEVQTGGFSKESILPKRNSDKLIARKKDWDPKKYGGFDSPTVAYSVLVVAKVEKGKSKKLKSVKELLGITIMERSSFEKNPIDFLEAKGYKEVKKDLIIKLPKYSLFELENGRKRMLASAGELQKGNELALPSKYVNFLYLASHYEKLKGSPEDNEQKQLFVEQHKHYLDEIIEQISEFSKRVILADANLDKVLSAYNKHRDKPIREQAENIIHLFTLTNLGAPAAFKYFDTTIDRKRYTSTKEVLDATLIHQSITGLYETRIDLSQLGGD

SEQ ID NO: 288 - protein, 1541 aa, synthetic construct
  REGION 1..1541: note = 115.3 Cas9 TadAins 1006 polypeptide sequence
MDKKYSIGLAIGTNSVGWAVITDEYKVPSKKFKVLGNTDRHSIKKNLIGALLFDSGETAEATRLKRTARRRYTRRKNRICYLQEIFSNEMAKVDDSFFHRLEESFLVEEDKKHERHPIFGNIVDEVAYHEKYPTIYHLRKKLVDSTDKADLRLIYLALAHMIKFRGHFLIEGDLNPDNSDVDKLFIQLVQTYNQLFEENPINASGVDAKAILSARLSKSRRLENLIAQLPGEKKNGLFGNLIALSLGLTPNFKSNFDLAEDAKLQLSKDTYDDDLDNLLAQIGDQYADLFLAAKNLSDAILLSDILRVNTEITKAPLSASMIKRYDEHHQDLTLLKALVRQQLPEKYKEIFFDQSKNGYAGYIDGGASQEEFYKFIKPILEKMDGTEELLVKLNREDLLRKQRTFDNGSIPHQIHLGELHAILRRQEDFYPFLKDNREKIEKILTFRIPYYVGPLARGNSRFAWMTRKSEETITPWNFEEVVDKGASAQSFIERMTNFDKNLPNEKVLPKHSLLYEYFTVYNELTKVKYVTEGMRKPAFLSGEQKKAIVDLLFKTNRKVTVKQLKEDYFKKIECFDSVEISGVEDRFNASLGTYHDLLKIIKDKDFLDNEENEDILEDIVLTLTLFEDREMIEERLKTYAHLFDDKVMKQLKRRRYTGWGRLSRKLINGIRDKQSGKTILDFLKSDGFANRNFMQLIHDDSLTFKEDIQKAQVSGQGDSLHEHIANLAGSPAIKKGILQTVKVVDELVKVMGRHKPENIVIEMARENQTTQKGQKNSRERMKRIEEGIKELGSQILKEHPVENTQLQNEKLYLYYLQNGRDMYVDQELDINRLSDYDVDHIVPQSFLKDDSIDNKVLTRSDKNRGKSDNVPSEEVVKKMKNYWRQLLNAKLITQRKFDNLTKAERGGLSELDKAGFIKRQLVETRQITKHVAQILDSRMNTKYDENDKLIREVKVITLKSKLVSDFRKDFQFYKVREINNYHHAHDAYLNAVVGTALIKKYPKLEGSSGSETPGTSESATPESSGSEVEFSHEYWMRHALTLAKRARDEREVPVGAVLVLNNRVIGEGWNRAIGLHDPTAHAEIMALRQGGLVMQNYRLIDATLYVTFEPCVMCAGAMIHSRIGRVVFGVRNAKTGAAGSLMDVLHYPGMNHRVEITEGILADECAALLCYFFRMPRQSEFVYGDYKVYDVRKMIAKSEQEIGKATAKYFFYSNIMNFFKTEITLANGEIRKRPLIETNGETGEIVWDKGRDFATVRKVLSMPQVNIVKKTEVQTGGFSKESILPKRNSDKLIARKKDWDPKKYGGFDSPTVAYSVLVVAKVEKGKSKKLKSVKELLGITIMERSSFEKNPIDFLEAKGYKEVKKDLIIKLPKYSLFELENGRKRMLASAGELQKGNELALPSKYVNFLYLASHYEKLKGSPEDNEQKQLFVEQHKHYLDEIIEQISEFSKRVILADANLDKVLSAYNKHRDKPIREQAENIIHLFTLTNLGAPAAFKYFDTTIDRKRYTSTKEVLDATLIHQSITGLYETRIDLSQLGGD

SEQ ID NO: 289 - protein, 1541 aa, synthetic construct
  REGION 1..1541: note = 115.4 Cas9 TadAins 1007 polypeptide sequence
MDKKYSIGLAIGTNSVGWAVITDEYKVPSKKFKVLGNTDRHSIKKNLIGALLFDSGETAEATRLKRTARRRYTRRKNRICYLQEIFSNEMAKVDDSFFHRLEESFLVEEDKKHERHPIFGNIVDEVAYHEKYPTIYHLRKKLVDSTDKADLRLIYLALAHMIKFRGHFLIEGDLNPDNSDVDKLFIQLVQTYNQLFEENPINASGVDAKAILSARLSKSRRLENLIAQLPGEKKNGLFGNLIALSLGLTPNFKSNFDLAEDAKLQLSKDTYDDDLDNLLAQIGDQYADLFLAAKNLSDAILLSDILRVNTEITKAPLSASMIKRYDEHHQDLTLLKALVRQQLPEKYKEIFFDQSKNGYAGYIDGGASQEEFYKFIKPILEKMDGTEELLVKLNREDLLRKQRTFDNGSIPHQIHLGELHAILRRQEDFYPFLKDNREKIEKILTFRIPYYVGPLARGNSRFAWMTRKSEETITPWNFEEVVDKGASAQSFIERMTNFDKNLPNEKVLPKHSLLYEYFTVYNELTKVKYVTEGMRKPAFLSGEQKKAIVDLLFKTNRKVTVKQLKEDYFKKIECFDSVEISGVEDRFNASLGTYHDLLKIIKDKDFLDNEENEDILEDIVLTLTLFEDREMIEERLKTYAHLFDDKVMKQLKRRRYTGWGRLSRKLINGIRDKQSGKTILDFLKSDGFANRNFMQLIHDDSLTFKEDIQKAQVSGQGDSLHEHIANLAGSPAIKKGILQTVKVVDELVKVMGRHKPENIVIEMARENQTTQKGQKNSRERMKRIEEGIKELGSQILKEHPVENTQLQNEKLYLYYLQNGRDMYVDQELDINRLSDYDVDHIVPQSFLKDDSIDNKVLTRSDKNRGKSDNVPSEEVVKKMKNYWRQLLNAKLITQRKFDNLTKAERGGLSELDKAGFIKRQLVETRQITKHVAQILDSRMNTKYDENDKLIREVKVITLKSKLVSDFRKDFQFYKVREINNYHHAHDAYLNAVVGTALIKKYPKLESGSSGSETPGTSESATPESSGSEVEFSHEYWMRHALTLAKRARDEREVPVGAVLVLNNRVIGEGWNRAIGLHDPTAHAEIMALRQGGLVMQNYRLIDATLYVTFEPCVMCAGAMIHSRIGRVVFGVRNAKTGAAGSLMDVLHYPGMNHRVEITEGILADECAALLCYFFRMPRQEFVYGDYKVYDVRKMIAKSEQEIGKATAKYFFYSNIMNFFKTEITLANGEIRKRPLIETNGETGEIVWDKGRDFATVRKVLSMPQVNIVKKTEVQTGGFSKESILPKRNSDKLIARKKDWDPKKYGGFDSPTVAYSVLVVAKVEKGKSKKLKSVKELLGITIMERSSFEKNPIDFLEAKGYKEVKKDLIIKLPKYSLFELENGRKRMLASAGELQKGNELALPSKYVNFLYLASHYEKLKGSPEDNEQKQLFVEQHKHYLDEIIEQISEFSKRVILADANLDKVLSAYNKHRDKPIREQAENIIHLFTLTNLGAPAAFKYFDTTIDRKRYTSTKEVLDATLIHQSITGLYETRIDLSQLGGD

SEQ ID NO: 290 - protein, 1541 aa, synthetic construct
  REGION 1..1541: note = 116.1 Cas9 TadAins C-term truncate 792 polypeptide sequence
MDKKYSIGLAIGTNSVGWAVITDEYKVPSKKFKVLGNTDRHSIKKNLIGALLFDSGETAEATRLKRTARRRYTRRKNRICYLQEIFSNEMAKVDDSFFHRLEESFLVEEDKKHERHPIFGNIVDEVAYHEKYPTIYHLRKKLVDSTDKADLRLIYLALAHMIKFRGHFLIEGDLNPDNSDVDKLFIQLVQTYNQLFEENPINASGVDAKAILSARLSKSRRLENLIAQLPGEKKNGLFGNLIALSLGLTPNFKSNFDLAEDAKLQLSKDTYDDDLDNLLAQIGDQYADLFLAAKNLSDAILLSDILRVNTEITKAPLSASMIKRYDEHHQDLTLLKALVRQQLPEKYKEIFFDQSKNGYAGYIDGGASQEEFYKFIKPILEKMDGTEELLVKLNREDLLRKQRTFDNGSIPHQIHLGELHAILRRQEDFYPFLKDNREKIEKILTFRIPYYVGPLARGNSRFAWMTRKSEETITPWNFEEVVDKGASAQSFIERMTNFDKNLPNEKVLPKHSLLYEYFTVYNELTKVKYVTEGMRKPAFLSGEQKKAIVDLLFKTNRKVTVKQLKEDYFKKIECFDSVEISGVEDRFNASLGTYHDLLKIIKDKDFLDNEENEDILEDIVLTLTLFEDREMIEERLKTYAHLFDDKVMKQLKRRRYTGWGRLSRKLINGIRDKQSGKTILDFLKSDGFANRNFMQLIHDDSLTFKEDIQKAQVSGQGDSLHEHIANLAGSPAIKKGILQTVKVVDELVKVMGRHKPENIVIEMARENQTTQKGQKNSRERMKRIEEGIKELGGSSGSETPGTSESATPESSGSEVEFSHEYWMRHALTLAKRARDEREVPVGAVLVLNNRVIGEGWNRAIGLHDPTAHAEIMALRQGGLVMQNYRLIDATLYVTFEPCVMCAGAMIHSRIGRVVFGVRNAKTGAAGSLMDVLHYPGMNHRVEITEGILADECAALLCYFFRMPRQSQILKEHPVENTQLQNEKLYLYYLQNGRDMYVDQELDINRLSDYDVDHIVPQSFLKDDSIDNKVLTRSDKNRGKSDNVPSEEVVKKMKNYWRQLLNAKLITQRKFDNLTKAERGGLSELDKAGFIKRQLVETRQITKHVAQILDSRMNTKYDENDKLIREVKVITLKSKLVSDFRKDFQFYKVREINNYHHAHDAYLNAVVGTALIKKYPKLESEFVYGDYKVYDVRKMIAKSEQEIGKATAKYFFYSNIMNFFKTEITLANGEIRKRPLIETNGETGEIVWDKGRDFATVRKVLSMPQVNIVKKTEVQTGGFSKESILPKRNSDKLIARKKDWDPKKYGGFDSPTVAYSVLVVAKVEKGKSKKLKSVKELLGITIMERSSFEKNPIDFLEAKGYKEVKKDLIIKLPKYSLFELENGRKRMLASAGELQKGNELALPSKYVNFLYLASHYEKLKGSPEDNEQKQLFVEQHKHYLDEIIEQISEFSKRVILADANLDKVLSAYNKHRDKPIREQAENIIHLFTLTNLGAPAAFKYFDTTIDRKRYTSTKEVLDATLIHQSITGLYETRIDLSQLGGD

SEQ ID NO: 291 - protein, 1541 aa, synthetic construct
  REGION 1..1541: note = 116.2 Cas9 TadAins C-term truncate 791 polypeptide sequence
MDKKYSIGLAIGTNSVGWAVITDEYKVPSKKFKVLGNTDRHSIKKNLIGALLFDSGETAEATRLKRTARRRYTRRKNRICYLQEIFSNEMAKVDDSFFHRLEESFLVEEDKKHERHPIFGNIVDEVAYHEKYPTIYHLRKKLVDSTDKADLRLIYLALAHMIKFRGHFLIEGDLNPDNSDVDKLFIQLVQTYNQLFEENPINASGVDAKAILSARLSKSRRLENLIAQLPGEKKNGLFGNLIALSLGLTPNFKSNFDLAEDAKLQLSKDTYDDDLDNLLAQIGDQYADLFLAAKNLSDAILLSDILRVNTEITKAPLSASMIKRYDEHHQDLTLLKALVRQQLPEKYKEIFFDQSKNGYAGYIDGGASQEEFYKFIKPILEKMDGTEELLVKLNREDLLRKQRTFDNGSIPHQIHLGELHAILRRQEDFYPFLKDNREKIEKILTFRIPYYVGPLARGNSRFAWMTRKSEETITPWNFEEVVDKGASAQSFIERMTNFDKNLPNEKVLPKHSLLYEYFTVYNELTKVKYVTEGMRKPAFLSGEQKKAIVDLLFKTNRKVTVKQLKEDYFKKIECFDSVEISGVEDRFNASLGTYHDLLKIIKDKDFLDNEENEDILEDIVLTLTLFEDREMIEERLKTYAHLFDDKVMKQLKRRRYTGWGRLSRKLINGIRDKQSGKTILDFLKSDGFANRNFMQLIHDDSLTFKEDIQKAQVSGQGDSLHEHIANLAGSPAIKKGILQTVKVVDELVKVMGRHKPENIVIEMARENQTTQKGQKNSRERMKRIEEGIKELGSSGSETPGTSESATPESSGSEVEFSHEYWMRHALTLAKRARDEREVPVGAVLVLNNRVIGEGWNRAIGLHDPTAHAEIMALRQGGLVMQNYRLIDATLYVTFEPCVMCAGAMIHSRIGRVVFGVRNAKTGAAGSLMDVLHYPGMNHRVEITEGILADECAALLCYFFRMPRQGSQILKEHPVENTQLQNEKLYLYYLQNGRDMYVDQELDINRLSDYDVDHIVPQSFLKDDSIDNKVLTRSDKNRGKSDNVPSEEVVKKMKNYWRQLLNAKLITQRKFDNLTKAERGGLSELDKAGFIKRQLVETRQITKHVAQILDSRMNTKYDENDKLIREVKVITLKSKLVSDFRKDFQFYKVREINNYHHAHDAYLNAVVGTALIKKYPKLESEFVYGDYKVYDVRKMIAKSEQEIGKATAKYFFYSNIMNFFKTEITLANGEIRKRPLIETNGETGEIVWDKGRDFATVRKVLSMPQVNIVKKTEVQTGGFSKESILPKRNSDKLIARKKDWDPKKYGGFDSPTVAYSVLVVAKVEKGKSKKLKSVKELLGITIMERSSFEKNPIDFLEAKGYKEVKKDLIIKLPKYSLFELENGRKRMLASAGELQKGNELALPSKYVNFLYLASHYEKLKGSPEDNEQKQLFVEQHKHYLDEIIEQISEFSKRVILADANLDKVLSAYNKHRDKPIREQAENIIHLFTLTNLGAPAAFKYFDTTIDRKRYTSTKEVLDATLIHQSITGLYETRIDLSQLGGD

SEQ ID NO: 292 - protein, 1541 aa, synthetic construct
  REGION 1..1541: note = 116.3 Cas9 TadAins C-term truncate 790 polypeptide sequence
MDKKYSIGLAIGTNSVGWAVITDEYKVPSKKFKVLGNTDRHSIKKNLIGALLFDSGETAEATRLKRTARRRYTRRKNRICYLQEIFSNEMAKVDDSFFHRLEESFLVEEDKKHERHPIFGNIVDEVAYHEKYPTIYHLRKKLVDSTDKADLRLIYLALAHMIKFRGHFLIEGDLNPDNSDVDKLFIQLVQTYNQLFEENPINASGVDAKAILSARLSKSRRLENLIAQLPGEKKNGLFGNLIALSLGLTPNFKSNFDLAEDAKLQLSKDTYDDDLDNLLAQIGDQYADLFLAAKNLSDAILLSDILRVNTEITKAPLSASMIKRYDEHHQDLTLLKALVRQQLPEKYKEIFFDQSKNGYAGYIDGGASQEEFYKFIKPILEKMDGTEELLVKLNREDLLRKQRTFDNGSIPHQIHLGELHAILRRQEDFYPFLKDNREKIEKILTFRIPYYVGPLARGNSRFAWMTRKSEETITPWNFEEVVDKGASAQSFIERMTNFDKNLPNEKVLPKHSLLYEYFTVYNELTKVKYVTEGMRKPAFLSGEQKKAIVDLLFKTNRKVTVKQLKEDYFKKIECFDSVEISGVEDRFNASLGTYHDLLKIIKDKDFLDNEENEDILEDIVLTLTLFEDREMIEERLKTYAHLFDDKVMKQLKRRRYTGWGRLSRKLINGIRDKQSGKTILDFLKSDGFANRNFMQLIHDDSLTFKEDIQKAQVSGQGDSLHEHIANLAGSPAIKKGILQTVKVVDELVKVMGRHKPENIVIEMARENQTTQKGQKNSRERMKRIEEGIKEGSSGSETPGTSESATPESSGSEVEFSHEYWMRHALTLAKRARDEREVPVGAVLVLNNRVIGEGWNRAIGLHDPTAHAEIMALRQGGLVMQNYRLIDATLYVTFEPCVMCAGAMIHSRIGRVVFGVRNAKTGAAGSLMDVLHYPGMNHRVEITEGILADECAALLCYFFRMPRQLGSQILKEHPVENTQLQNEKLYLYYLQNGRDMYVDQELDINRLSDYDVDHIVPQSFLKDDSIDNKVLTRSDKNRGKSDNVPSEEVVKKMKNYWRQLLNAKLITQRKFDNLTKAERGGLSELDKAGFIKRQLVETRQITKHVAQILDSRMNTKYDENDKLIREVKVITLKSKLVSDFRKDFQFYKVREINNYHHAHDAYLNAVVGTALIKKYPKLESEFVYGDYKVYDVRKMIAKSEQEIGKATAKYFFYSNIMNFFKTEITLANGEIRKRPLIETNGETGEIVWDKGRDFATVRKVLSMPQVNIVKKTEVQTGGFSKESILPKRNSDKLIARKKDWDPKKYGGFDSPTVAYSVLVVAKVEKGKSKKLKSVKELLGITIMERSSFEKNPIDFLEAKGYKEVKKDLIIKLPKYSLFELENGRKRMLASAGELQKGNELALPSKYVNFLYLASHYEKLKGSPEDNEQKQLFVEQHKHYLDEIIEQISEFSKRVILADANLDKVLSAYNKHRDKPIREQAENIIHLFTLTNLGAPAAFKYFDTTIDRKRYTSTKEVLDATLIHQSITGLYETRIDLSQLGGD

SEQ ID NO: 293 - protein, 1484 aa, synthetic construct
  REGION 1..1484: note = 117 Cas9 delta 1017-1069 polypeptide sequence
MDKKYSIGLAIGTNSVGWAVITDEYKVPSKKFKVLGNTDRHSIKKNLIGALLFDSGETAEATRLKRTARRRYTRRKNRICYLQEIFSNEMAKVDDSFFHRLEESFLVEEDKKHERHPIFGNIVDEVAYHEKYPTIYHLRKKLVDSTDKADLRLIYLALAHMIKFRGHFLIEGDLNPDNSDVDKLFIQLVQTYNQLFEENPINASGVDAKAILSARLSKSRRLENLIAQLPGEKKNGLFGNLIALSLGLTPNFKSNFDLAEDAKLQLSKDTYDDDLDNLLAQIGDQYADLFLAAKNLSDAILLSDILRVNTEITKAPLSASMIKRYDEHHQDLTLLKALVRQQLPEKYKEIFFDQSKNGYAGYIDGGASQEEFYKFIKPILEKMDGTEELLVKLNREDLLRKQRTFDNGSIPHQIHLGELHAILRRQEDFYPFLKDNREKIEKILTFRIPYYVGPLARGNSRFAWMTRKSEETITPWNFEEVVDKGASAQSFIERMTNFDKNLPNEKVLPKHSLLYEYFTVYNELTKVKYVTEGMRKPAFLSGEQKKAIVDLLFKTNRKVTVKQLKEDYFKKIECFDSVEISGVEDRFNASLGTYHDLLKIIKDKDFLDNEENEDILEDIVLTLTLFEDREMIEERLKTYAHLFDDKVMKQLKRRRYTGWGRLSRKLINGIRDKQSGKTILDFLKSDGFANRNFMQLIHDDSLTFKEDIQKAQVSGQGDSLHEHIANLAGSPAIKKGILQTVKVVDELVKVMGRHKPENIVIEMARENQTTQKGQKNSRERMKRIEEGIKELGSQILKEHPVENTQLQNEKLYLYYLQNGRDMYVDQELDINRLSDYDVDHIVPQSFLKDDSIDNKVLTRSDKNRGKSDNVPSEEVVKKMKNYWRQLLNAKLITQRKFDNLTKAERGGLSELDKAGFIKRQLVETRQITKHVAQILDSRMNTKYDENDKLIREVKVITLKSKLVSDFRKDFQFYKVREINNYHHAHDAYLNAVVGTALIKKYPKLESEFVYGDYKVYSSGSEVEFSHEYWMRHALTLAKRARDEREVPVGAVLVLNNRVIGEGWNRAIGLHDPTAHAEIMALRQGGLVMQNYRLIDATLYVTFEPCVMCAGAMIHSRIGRVVFGVRNAKTGAAGSLMDVLHYPGMNHRVEITEGILADECAALLCYFFRMPRQVFNAQKKAQSSTDGEIVWDKGRDFATVRKVLSMPQVNIVKKTEVQTGGFSKESILPKRNSDKLIARKKDWDPKKYGGFDSPTVAYSVLVVAKVEKGKSKKLKSVKELLGITIMERSSFEKNPIDFLEAKGYKEVKKDLIIKLPKYSLFELENGRKRMLASAGELQKGNELALPSKYVNFLYLASHYEKLKGSPEDNEQKQLFVEQHKHYLDEIIEQISEFSKRVILADANLDKVLSAYNKHRDKPIREQAENIIHLFTLTNLGAPAAFKYFDTTIDRKRYTSTKEVLDATLIHQSITGLYETRIDLSQLGGD

SEQ ID NO: 294 - protein, 1554 aa, synthetic construct
  REGION 1..1554: note = 118 Cas9 TadA-CP116ins 1067 polypeptide sequence
MDKKYSIGLAIGTNSVGWAVITDEYKVPSKKFKVLGNTDRHSIKKNLIGALLFDSGETAEATRLKRTARRRYTRRKNRICYLQEIFSNEMAKVDDSFFHRLEESFLVEEDKKHERHPIFGNIVDEVAYHEKYPTIYHLRKKLVDSTDKADLRLIYLALAHMIKFRGHFLIEGDLNPDNSDVDKLFIQLVQTYNQLFEENPINASGVDAKAILSARLSKSRRLENLIAQLPGEKKNGLFGNLIALSLGLTPNFKSNFDLAEDAKLQLSKDTYDDDLDNLLAQIGDQYADLFLAAKNLSDAILLSDILRVNTEITKAPLSASMIKRYDEHHQDLTLLKALVRQQLPEKYKEIFFDQSKNGYAGYIDGGASQEEFYKFIKPILEKMDGTEELLVKLNREDLLRKQRTFDNGSIPHQIHLGELHAILRRQEDFYPFLKDNREKIEKILTFRIPYYVGPLARGNSRFAWMTRKSEETITPWNFEEVVDKGASAQSFIERMTNFDKNLPNEKVLPKHSLLYEYFTVYNELTKVKYVTEGMRKPAFLSGEQKKAIVDLLFKTNRKVTVKQLKEDYFKKIECFDSVEISGVEDRFNASLGTYHDLLKIIKDKDFLDNEENEDILEDIVLTLTLFEDREMIEERLKTYAHLFDDKVMKQLKRRRYTGWGRLSRKLINGIRDKQSGKTILDFLKSDGFANRNFMQLIHDDSLTFKEDIQKAQVSGQGDSLHEHIANLAGSPAIKKGILQTVKVVDELVKVMGRHKPENIVIEMARENQTTQKGQKNSRERMKRIEEGIKELGSQILKEHPVENTQLQNEKLYLYYLQNGRDMYVDQELDINRLSDYDVDHIVPQSFLKDDSIDNKVLTRSDKNRGKSDNVPSEEVVKKMKNYWRQLLNAKLITQRKFDNLTKAERGGLSELDKAGFIKRQLVETRQITKHVAQILDSRMNTKYDENDKLIREVKVITLKSKLVSDFRKDFQFYKVREINNYHHAHDAYLNAVVGTALIKKYPKLESEFVYGDYKVYDVRKMIAKSEQEIGKATAKYFFYSNIMNFFKTEITLANGEIRKRPLIETNMNHRVEITEGILADECAALLCYFFRMPRQVFNAQKKAQSSTDGSSGSETPGTSESATPESSGSEVEFSHEYWMRHALTLAKRARDEREVPVGAVLVLNNRVIGEGWNRAIGLHDPTAHAEIMALRQGGLVMQNYRLIDATLYVTFEPCVMCAGAMIHSRIGRVVFGVRNAKTGAAGSLMDVLHYPGGETGEIVWDKGRDFATVRKVLSMPQVNIVKKTEVQTGGFSKESILPKRNSDKLIARKKDWDPKKYGGFDSPTVAYSVLVVAKVEKGKSKKLKSVKELLGITIMERSSFEKNPIDFLEAKGYKEVKKDLIIKLPKYSLFELENGRKRMLASAGELQKGNELALPSKYVNFLYLASHYEKLKGSPEDNEQKQLFVEQHKHYLDEIIEQISEFSKRVILADANLDKVLSAYNKHRDKPIREQAENIIHLFTLTNLGAPAAFKYFDTTIDRKRYTSTKEVLDATLIHQSITGLYETRIDLSQLGGD

SEQ ID NO: 295 - protein, 1554 aa, synthetic construct
  REGION 1..1554: note = 119 Cas9 TadAins 701 polypeptide sequence
MDKKYSIGLAIGTNSVGWAVITDEYKVPSKKFKVLGNTDRHSIKKNLIGALLFDSGETAEATRLKRTARRRYTRRKNRICYLQEIFSNEMAKVDDSFFHRLEESFLVEEDKKHERHPIFGNIVDEVAYHEKYPTIYHLRKKLVDSTDKADLRLIYLALAHMIKFRGHFLIEGDLNPDNSDVDKLFIQLVQTYNQLFEENPINASGVDAKAILSARLSKSRRLENLIAQLPGEKKNGLFGNLIALSLGLTPNFKSNFDLAEDAKLQLSKDTYDDDLDNLLAQIGDQYADLFLAAKNLSDAILLSDILRVNTEITKAPLSASMIKRYDEHHQDLTLLKALVRQQLPEKYKEIFFDQSKNGYAGYIDGGASQEEFYKFIKPILEKMDGTEELLVKLNREDLLRKQRTFDNGSIPHQIHLGELHAILRRQEDFYPFLKDNREKIEKILTFRIPYYVGPLARGNSRFAWMTRKSEETITPWNFEEVVDKGASAQSFIERMTNFDKNLPNEKVLPKHSLLYEYFTVYNELTKVKYVTEGMRKPAFLSGEQKKAIVDLLFKTNRKVTVKQLKEDYFKKIECFDSVEISGVEDRFNASLGTYHDLLKIIKDKDFLDNEENEDILEDIVLTLTLFEDREMIEERLKTYAHLFDDKVMKQLKRRRYTGWGRLSRKLINGIRDKQSGKTILDFLKSDGFANRNFMQLIHDDSGSSGSETPGTSESATPESSGSEVEFSHEYWMRHALTLAKRARDEREVPVGAVLVLNNRVIGEGWNRAIGLHDPTAHAEIMALRQGGLVMQNYRLIDATLYVTFEPCVMCAGAMIHSRIGRVVFGVRNAKTGAAGSLMDVLHYPGMNHRVEITEGILADECAALLCYFFRMPRQVFNAQKKAQSSTDLTFKEDIQKAQVSGQGDSLHEHIANLAGSPAIKKGILQTVKVVDELVKVMGRHKPENIVIEMARENQTTQKGQKNSRERMKRIEEGIKELGSQILKEHPVENTQLQNEKLYLYYLQNGRDMYVDQELDINRLSDYDVDHIVPQSFLKDDSIDNKVLTRSDKNRGKSDNVPSEEVVKKMKNYWRQLLNAKLITQRKFDNLTKAERGGLSELDKAGFIKRQLVETRQITKHVAQILDSRMNTKYDENDKLIREVKVITLKSKLVSDFRKDFQFYKVREINNYHHAHDAYLNAVVGTALIKKYPKLESEFVYGDYKVYDVRKMIAKSEQEIGKATAKYFFYSNIMNFFKTEITLANGEIRKRPLIETNGETGEIVWDKGRDFATVRKVLSMPQVNIVKKTEVQTGGFSKESILPKRNSDKLIARKKDWDPKKYGGFDSPTVAYSVLVVAKVEKGKSKKLKSVKELLGITIMERSSFEKNPIDFLEAKGYKEVKKDLIIKLPKYSLFELENGRKRMLASAGELQKGNELALPSKYVNFLYLASHYEKLKGSPEDNEQKQLFVEQHKHYLDEIIEQISEFSKRVILADANLDKVLSAYNKHRDKPIREQAENIIHLFTLTNLGAPAAFKYFDTTIDRKRYTSTKEVLDATLIHQSITGLYETRIDLSQLGGD

SEQ ID NO: 296 - protein, 1554 aa, synthetic construct
  REGION 1..1554: note = 120 Cas9 TadACP136ins 1248 polypeptide sequence
MDKKYSIGLAIGTNSVGWAVITDEYKVPSKKFKVLGNTDRHSIKKNLIGALLFDSGETAEATRLKRTARRRYTRRKNRICYLQEIFSNEMAKVDDSFFHRLEESFLVEEDKKHERHPIFGNIVDEVAYHEKYPTIYHLRKKLVDSTDKADLRLIYLALAHMIKFRGHFLIEGDLNPDNSDVDKLFIQLVQTYNQLFEENPINASGVDAKAILSARLSKSRRLENLIAQLPGEKKNGLFGNLIALSLGLTPNFKSNFDLAEDAKLQLSKDTYDDDLDNLLAQIGDQYADLFLAAKNLSDAILLSDILRVNTEITKAPLSASMIKRYDEHHQDLTLLKALVRQQLPEKYKEIFFDQSKNGYAGYIDGGASQEEFYKFIKPILEKMDGTEELLVKLNREDLLRKQRTFDNGSIPHQIHLGELHAILRRQEDFYPFLKDNREKIEKILTFRIPYYVGPLARGNSRFAWMTRKSEETITPWNFEEVVDKGASAQSFIERMTNFDKNLPNEKVLPKHSLLYEYFTVYNELTKVKYVTEGMRKPAFLSGEQKKAIVDLLFKTNRKVTVKQLKEDYFKKIECFDSVEISGVEDRFNASLGTYHDLLKIIKDKDFLDNEENEDILEDIVLTLTLFEDREMIEERLKTYAHLFDDKVMKQLKRRRYTGWGRLSRKLINGIRDKQSGKTILDFLKSDGFANRNFMQLIHDDSLTFKEDIQKAQVSGQGDSLHEHIANLAGSPAIKKGILQTVKVVDELVKVMGRHKPENIVIEMARENQTTQKGQKNSRERMKRIEEGIKELGSQILKEHPVENTQLQNEKLYLYYLQNGRDMYVDQELDINRLSDYDVDHIVPQSFLKDDSIDNKVLTRSDKNRGKSDNVPSEEVVKKMKNYWRQLLNAKLITQRKFDNLTKAERGGLSELDKAGFIKRQLVETRQITKHVAQILDSRMNTKYDENDKLIREVKVITLKSKLVSDFRKDFQFYKVREINNYHHAHDAYLNAVVGTALIKKYPKLESEFVYGDYKVYDVRKMIAKSEQEIGKATAKYFFYSNIMNFFKTEITLANGEIRKRPLIETNGETGEIVWDKGRDFATVRKVLSMPQVNIVKKTEVQTGGFSKESILPKRNSDKLIARKKDWDPKKYGGFDSPTVAYSVLVVAKVEKGKSKKLKSVKELLGITIMERSSFEKNPIDFLEAKGYKEVKKDLIIKLPKYSLFELENGRKRMLASAGELQKGNELALPSKYVNFLYLASHYEKLKGSMNHRVEITEGILADECAALLCYFFRMPRQVFNAQKKAQSSTDGSSGSETPGTSESATPESSGSEVEFSHEYWMRHALTLAKRARDEREVPVGAVLVLNNRVIGEGWNRAIGLHDPTAHAEIMALRQGGLVMQNYRLIDATLYVTFEPCVMCAGAMIHSRIGRVVFGVRNAKTGAAGSLMDVLHYPGPEDNEQKQLFVEQHKHYLDEIIEQISEFSKRVILADANLDKVLSAYNKHRDKPIREQAENIIHLFTLTNLGAPAAFKYFDTTIDRKRYTSTKEVLDATLIHQSITGLYETRIDLSQLGGD

SEQ ID NO: 297 - protein, 1554 aa, synthetic construct
  REGION 1..1554: note = 121 Cas9 TadACP136ins 1052 polypeptide sequence
MDKKYSIGLAIGTNSVGWAVITDEYKVPSKKFKVLGNTDRHSIKKNLIGALLFDSGETAEATRLKRTARRRYTRRKNRICYLQEIFSNEMAKVDDSFFHRLEESFLVEEDKKHERHPIFGNIVDEVAYHEKYPTIYHLRKKLVDSTDKADLRLIYLALAHMIKFRGHFLIEGDLNPDNSDVDKLFIQLVQTYNQLFEENPINASGVDAKAILSARLSKSRRLENLIAQLPGEKKNGLFGNLIALSLGLTPNFKSNFDLAEDAKLQLSKDTYDDDLDNLLAQIGDQYADLFLAAKNLSDAILLSDILRVNTEITKAPLSASMIKRYDEHHQDLTLLKALVRQQLPEKYKEIFFDQSKNGYAGYIDGGASQEEFYKFIKPILEKMDGTEELLVKLNREDLLRKQRTFDNGSIPHQIHLGELHAILRRQEDFYPFLKDNREKIEKILTFRIPYYVGPLARGNSRFAWMTRKSEETITPWNFEEVVDKGASAQSFIERMTNFDKNLPNEKVLPKHSLLYEYFTVYNELTKVKYVTEGMRKPAFLSGEQKKAIVDLLFKTNRKVTVKQLKEDYFKKIECFDSVEISGVEDRFNASLGTYHDLLKIIKDKDFLDNEENEDILEDIVLTLTLFEDREMIEERLKTYAHLFDDKVMKQLKRRRYTGWGRLSRKLINGIRDKQSGKTILDFLKSDGFANRNFMQLIHDDSLTFKEDIQKAQVSGQGDSLHEHIANLAGSPAIKKGILQTVKVVDELVKVMGRHKPENIVIEMARENQTTQKGQKNSRERMKRIEEGIKELGSQILKEHPVENTQLQNEKLYLYYLQNGRDMYVDQELDINRLSDYDVDHIVPQSFLKDDSIDNKVLTRSDKNRGKSDNVPSEEVVKKMKNYWRQLLNAKLITQRKFDNLTKAERGGLSELDKAGFIKRQLVETRQITKHVAQILDSRMNTKYDENDKLIREVKVITLKSKLVSDFRKDFQFYKVREINNYHHAHDAYLNAVVGTALIKKYPKLESEFVYGDYKVYDVRKMIAKSEQEIGKATAKYFFYSNIMNFFKTEITLAMNHRVEITEGILADECAALLCYFFRMPRQVFNAQKKAQSSTDGSSGSETPGTSESATPESSGSEVEFSHEYWMRHALTLAKRARDEREVPVGAVLVLNNRVIGEGWNRAIGLHDPTAHAEIMALRQGGLVMQNYRLIDATLYVTFEPCVMCAGAMIHSRIGRVVFGVRNAKTGAAGSLMDVLHYPGNGEIRKRPLIETNGETGEIVWDKGRDFATVRKVLSMPQVNIVKKTEVQTGGFSKESILPKRNSDKLIARKKDWDPKKYGGFDSPTVAYSVLVVAKVEKGKSKKLKSVKELLGITIMERSSFEKNPIDFLEAKGYKEVKKDLIIKLPKYSLFELENGRKRMLASAGELQKGNELALPSKYVNFLYLASHYEKLKGSPEDNEQKQLFVEQHKHYLDEIIEQISEFSKRVILADANLDKVLSAYNKHRDKPIREQAENIIHLFTLTNLGAPAAFKYFDTTIDRKRYTSTKEVLDATLIHQSITGLYETRIDLSQLGGD

SEQ ID NO: 298 - protein, 1554 aa, synthetic construct
  REGION 1..1554: note = 122 Cas9 TadACP136ins 1041 polypeptide sequence
MDKKYSIGLAIGTNSVGWAVITDEYKVPSKKFKVLGNTDRHSIKKNLIGALLFDSGETAEATRLKRTARRRYTRRKNRICYLQEIFSNEMAKVDDSFFHRLEESFLVEEDKKHERHPIFGNIVDEVAYHEKYPTIYHLRKKLVDSTDKADLRLIYLALAHMIKFRGHFLIEGDLNPDNSDVDKLFIQLVQTYNQLFEENPINASGVDAKAILSARLSKSRRLENLIAQLPGEKKNGLFGNLIALSLGLTPNFKSNFDLAEDAKLQLSKDTYDDDLDNLLAQIGDQYADLFLAAKNLSDAILLSDILRVNTEITKAPLSASMIKRYDEHHQDLTLLKALVRQQLPEKYKEIFFDQSKNGYAGYIDGGASQEEFYKFIKPILEKMDGTEELLVKLNREDLLRKQRTFDNGSIPHQIHLGELHAILRRQEDFYPFLKDNREKIEKILTFRIPYYVGPLARGNSRFAWMTRKSEETITPWNFEEVVDKGASAQSFIERMTNFDKNLPNEKVLPKHSLLYEYFTVYNELTKVKYVTEGMRKPAFLSGEQKKAIVDLLFKTNRKVTVKQLKEDYFKKIECFDSVEISGVEDRFNASLGTYHDLLKIIKDKDFLDNEENEDILEDIVLTLTLFEDREMIEERLKTYAHLFDDKVMKQLKRRRYTGWGRLSRKLINGIRDKQSGKTILDFLKSDGFANRNFMQLIHDDSLTFKEDIQKAQVSGQGDSLHEHIANLAGSPAIKKGILQTVKVVDELVKVMGRHKPENIVIEMARENQTTQKGQKNSRERMKRIEEGIKELGSQILKEHPVENTQLQNEKLYLYYLQNGRDMYVDQELDINRLSDYDVDHIVPQSFLKDDSIDNKVLTRSDKNRGKSDNVPSEEVVKKMKNYWRQLLNAKLITQRKFDNLTKAERGGLSELDKAGFIKRQLVETRQITKHVAQILDSRMNTKYDENDKLIREVKVITLKSKLVSDFRKDFQFYKVREINNYHHAHDAYLNAVVGTALIKKYPKLESEFVYGDYKVYDVRKMIAKSEQEIGKATAKYFFYSMNHRVEITEGILADECAALLCYFFRMPRQVFNAQKKAQSSTDGSSGSETPGTSESATPESSGSEVEFSHEYWMRHALTLAKRARDEREVPVGAVLVLNNRVIGEGWNRAIGLHDPTAHAEIMALRQGGLVMQNYRLIDATLYVTFEPCVMCAGAMIHSRIGRVVFGVRNAKTGAAGSLMDVLHYPGNIMNFFKTEITLANGEIRKRPLIETNGETGEIVWDKGRDFATVRKVLSMPQVNIVKKTEVQTGGFSKESILPKRNSDKLIARKKDWDPKKYGGFDSPTVAYSVLVVAKVEKGKSKKLKSVKELLGITIMERSSFEKNPIDFLEAKGYKEVKKDLIIKLPKYSLFELENGRKRMLASAGELQKGNELALPSKYVNFLYLASHYEKLKGSPEDNEQKQLFVEQHKHYLDEIIEQISEFSKRVILADANLDKVLSAYNKHRDKPIREQAENIIHLFTLTNLGAPAAFKYFDTTIDRKRYTSTKEVLDATLIHQSITGLYETRIDLSQLGGD

SEQ ID NO: 299 - protein, 1554 aa, synthetic construct
  REGION 1..1554: note = 123 Cas9 TadACP139ins 1299 polypeptide sequence
MDKKYSIGLAIGTNSVGWAVITDEYKVPSKKFKVLGNTDRHSIKKNLIGALLFDSGETAEATRLKRTARRRYTRRKNRICYLQEIFSNEMAKVDDSFFHRLEESFLVEEDKKHERHPIFGNIVDEVAYHEKYPTIYHLRKKLVDSTDKADLRLIYLALAHMIKFRGHFLIEGDLNPDNSDVDKLFIQLVQTYNQLFEENPINASGVDAKAILSARLSKSRRLENLIAQLPGEKKNGLFGNLIALSLGLTPNFKSNFDLAEDAKLQLSKDTYDDDLDNLLAQIGDQYADLFLAAKNLSDAILLSDILRVNTEITKAPLSASMIKRYDEHHQDLTLLKALVRQQLPEKYKEIFFDQSKNGYAGYIDGGASQEEFYKFIKPILEKMDGTEELLVKLNREDLLRKQRTFDNGSIPHQIHLGELHAILRRQEDFYPFLKDNREKIEKILTFRIPYYVGPLARGNSRFAWMTRKSEETITPWNFEEVVDKGASAQSFIERMTNFDKNLPNEKVLPKHSLLYEYFTVYNELTKVKYVTEGMRKPAFLSGEQKKAIVDLLFKTNRKVTVKQLKEDYFKKIECFDSVEISGVEDRFNASLGTYHDLLKIIKDKDFLDNEENEDILEDIVLTLTLFEDREMIEERLKTYAHLFDDKVMKQLKRRRYTGWGRLSRKLINGIRDKQSGKTILDFLKSDGFANRNFMQLIHDDSLTFKEDIQKAQVSGQGDSLHEHIANLAGSPAIKKGILQTVKVVDELVKVMGRHKPENIVIEMARENQTTQKGQKNSRERMKRIEEGIKELGSQILKEHPVENTQLQNEKLYLYYLQNGRDMYVDQELDINRLSDYDVDHIVPQSFLKDDSIDNKVLTRSDKNRGKSDNVPSEEVVKKMKNYWRQLLNAKLITQRKFDNLTKAERGGLSELDKAGFIKRQLVETRQITKHVAQILDSRMNTKYDENDKLIREVKVITLKSKLVSDFRKDFQFYKVREINNYHHAHDAYLNAVVGTALIKKYPKLESEFVYGDYKVYDVRKMIAKSEQEIGKATAKYFFYSNIMNFFKTEITLANGEIRKRPLIETNGETGEIVWDKGRDFATVRKVLSMPQVNIVKKTEVQTGGFSKESILPKRNSDKLIARKKDWDPKKYGGFDSPTVAYSVLVVAKVEKGKSKKLKSVKELLGITIMERSSFEKNPIDFLEAKGYKEVKKDLIIKLPKYSLFELENGRKRMLASAGELQKGNELALPSKYVNFLYLASHYEKLKGSPEDNEQKQLFVEQHKHYLDEIIEQISEFSKRVILADANLDKVLSAYNKHRMNHRVEITEGILADECAALLCYFFRMPRQVFNAQKKAQSSTDGSSGSETPGTSESATPESSGSEVEFSHEYWMRHALTLAKRARDEREVPVGAVLVLNNRVIGEGWNRAIGLHDPTAHAEIMALRQGGLVMQNYRLIDATLYVTFEPCVMCAGAMIHSRIGRVVFGVRNAKTGAAGSLMDVLHYPGDKPIREQAENIIHLFTLTNLGAPAAFKYFDTTIDRKRYTSTKEVLDATLIHQSITGLYETRIDLSQLGGD

SEQ ID NO: 300 - protein, 1454 aa, synthetic construct
  REGION 1..1454: note = 124 Cas9 delta 792-872TadAins polypeptide sequence
MDKKYSIGLAIGTNSVGWAVITDEYKVPSKKFKVLGNTDRHSIKKNLIGALLFDSGETAEATRLKRTARRRYTRRKNRICYLQEIFSNEMAKVDDSFFHRLEESFLVEEDKKHERHPIFGNIVDEVAYHEKYPTIYHLRKKLVDSTDKADLRLIYLALAHMIKFRGHFLIEGDLNPDNSDVDKLFIQLVQTYNQLFEENPINASGVDAKAILSARLSKSRRLENLIAQLPGEKKNGLFGNLIALSLGLTPNFKSNFDLAEDAKLQLSKDTYDDDLDNLLAQIGDQYADLFLAAKNLSDAILLSDILRVNTEITKAPLSASMIKRYDEHHQDLTLLKALVRQQLPEKYKEIFFDQSKNGYAGYIDGGASQEEFYKFIKPILEKMDGTEELLVKLNREDLLRKQRTFDNGSIPHQIHLGELHAILRRQEDFYPFLKDNREKIEKILTFRIPYYVGPLARGNSRFAWMTRKSEETITPWNFEEVVDKGASAQSFIERMTNFDKNLPNEKVLPKHSLLYEYFTVYNELTKVKYVTEGMRKPAFLSGEQKKAIVDLLFKTNRKVTVKQLKEDYFKKIECFDSVEISGVEDRFNASLGTYHDLLKIIKDKDFLDNEENEDILEDIVLTLTLFEDREMIEERLKTYAHLFDDKVMKQLKRRRYTGWGRLSRKLINGIRDKQSGKTILDFLKSDGFANRNFMQLIHDDSLTFKEDIQKAQVSGQGDSLHEHIANLAGSPAIKKGILQTVKVVDELVKVMGRHKPENIVIEMARENQTTQKGQKNSRERMKRIEEGIKELGSEVEFSHEYWMRHALTLAKRARDEREVPVGAVLVLNNRVIGEGWNRAIGLHDPTAHAEIMALRQGGLVMQNYRLIDATLYVTFEPCVMCAGAMIHSRIGRVVFGVRNAKTGAAGSLMDVLHYPGMNHRVEITEGILADECAALLCYFFRMPRQVFNAQKKAQSSTDEEVVKKMKNYWRQLLNAKLITQRKFDNLTKAERGGLSELDKAGFIKRQLVETRQITKHVAQILDSRMNTKYDENDKLIREVKVITLKSKLVSDFRKDFQFYKVREINNYHHAHDAYLNAVVGTALIKKYPKLESEFVYGDYKVYDVRKMIAKSEQEIGKATAKYFFYSNIMNFFKTEITLANGEIRKRPLIETNGETGEIVWDKGRDFATVRKVLSMPQVNIVKKTEVQTGGFSKESILPKRNSDKLIARKKDWDPKKYGGFDSPTVAYSVLVVAKVEKGKSKKLKSVKELLGITIMERSSFEKNPIDFLEAKGYKEVKKDLIIKLPKYSLFELENGRKRMLASAGELQKGNELALPSKYVNFLYLASHYEKLKGSPEDNEQKQLFVEQHKHYLDEIIEQISEFSKRVILADANLDKVLSAYNKHRDKPIREQAENIIHLFTLTNLGAPAAFKYFDTTIDRKRYTSTKEVLDATLIHQSITGLYETRIDLSQLGGD

SEQ ID NO: 301 - protein, 1420 aa, synthetic construct
  REGION 1..1420: note = 125 Cas9 delta 792-906TadAins polypeptide sequence
MDKKYSIGLAIGTNSVGWAVITDEYKVPSKKFKVLGNTDRHSIKKNLIGALLFDSGETAEATRLKRTARRRYTRRKNRICYLQEIFSNEMAKVDDSFFHRLEESFLVEEDKKHERHPIFGNIVDEVAYHEKYPTIYHLRKKLVDSTDKADLRLIYLALAHMIKFRGHFLIEGDLNPDNSDVDKLFIQLVQTYNQLFEENPINASGVDAKAILSARLSKSRRLENLIAQLPGEKKNGLFGNLIALSLGLTPNFKSNFDLAEDAKLQLSKDTYDDDLDNLLAQIGDQYADLFLAAKNLSDAILLSDILRVNTEITKAPLSASMIKRYDEHHQDLTLLKALVRQQLPEKYKEIFFDQSKNGYAGYIDGGASQEEFYKFIKPILEKMDGTEELLVKLNREDLLRKQRTFDNGSIPHQIHLGELHAILRRQEDFYPFLKDNREKIEKILTFRIPYYVGPLARGNSRFAWMTRKSEETITPWNFEEVVDKGASAQSFIERMTNFDKNLPNEKVLPKHSLLYEYFTVYNELTKVKYVTEGMRKPAFLSGEQKKAIVDLLFKTNRKVTVKQLKEDYFKKIECFDSVEISGVEDRFNASLGTYHDLLKIIKDKDFLDNEENEDILEDIVLTLTLFEDREMIEERLKTYAHLFDDKVMKQLKRRRYTGWGRLSRKLINGIRDKQSGKTILDFLKSDGFANRNFMQLIHDDSLTFKEDIQKAQVSGQGDSLHEHIANLAGSPAIKKGILQTVKVVDELVKVMGRHKPENIVIEMARENQTTQKGQKNSRERMKRIEEGIKELGSEVEFSHEYWMRHALTLAKRARDEREVPVGAVLVLNNRVIGEGWNRAIGLHDPTAHAEIMALRQGGLVMQNYRLIDATLYVTFEPCVMCAGAMIHSRIGRVVFGVRNAKTGAAGSLMDVLHYPGMNHRVEITEGILADECAALLCYFFRMPRQVFNAQKKAQSSTDGLSELDKAGFIKRQLVETRQITKHVAQILDSRMNTKYDENDKLIREVKVITLKSKLVSDFRKDFQFYKVREINNYHHAHDAYLNAVVGTALIKKYPKLESEFVYGDYKVYDVRKMIAKSEQEIGKATAKYFFYSNIMNFFKTEITLANGEIRKRPLIETNGETGEIVWDKGRDFATVRKVLSMPQVNIVKKTEVQTGGFSKESILPKRNSDKLIARKKDWDPKKYGGFDSPTVAYSVLVVAKVEKGKSKKLKSVKELLGITIMERSSFEKNPIDFLEAKGYKEVKKDLIIKLPKYSLFELENGRKRMLASAGELQKGNELALPSKYVNFLYLASHYEKLKGSPEDNEQKQLFVEQHKHYLDEIIEQISEFSKRVILADANLDKVLSAYNKHRDKPIREQAENIIHLFTLTNLGAPAAFKYFDTTIDRKRYTSTKEVLDATLIHQSITGLYETRIDLSQLGGD

SEQ ID NO: 302 - protein, 1554 aa, synthetic construct
  REGION 1..1554: note = 126 TadA CP65ins 1003 polypeptide sequence
MDKKYSIGLAIGTNSVGWAVITDEYKVPSKKFKVLGNTDRHSIKKNLIGALLFDSGETAEATRLKRTARRRYTRRKNRICYLQEIFSNEMAKVDDSFFHRLEESFLVEEDKKHERHPIFGNIVDEVAYHEKYPTIYHLRKKLVDSTDKADLRLIYLALAHMIKFRGHFLIEGDLNPDNSDVDKLFIQLVQTYNQLFEENPINASGVDAKAILSARLSKSRRLENLIAQLPGEKKNGLFGNLIALSLGLTPNFKSNFDLAEDAKLQLSKDTYDDDLDNLLAQIGDQYADLFLAAKNLSDAILLSDILRVNTEITKAPLSASMIKRYDEHHQDLTLLKALVRQQLPEKYKEIFFDQSKNGYAGYIDGGASQEEFYKFIKPILEKMDGTEELLVKLNREDLLRKQRTFDNGSIPHQIHLGELHAILRRQEDFYPFLKDNREKIEKILTFRIPYYVGPLARGNSRFAWMTRKSEETITPWNFEEVVDKGASAQSFIERMTNFDKNLPNEKVLPKHSLLYEYFTVYNELTKVKYVTEGMRKPAFLSGEQKKAIVDLLFKTNRKVTVKQLKEDYFKKIECFDSVEISGVEDRFNASLGTYHDLLKIIKDKDFLDNEENEDILEDIVLTLTLFEDREMIEERLKTYAHLFDDKVMKQLKRRRYTGWGRLSRKLINGIRDKQSGKTILDFLKSDGFANRNFMQLIHDDSLTFKEDIQKAQVSGQGDSLHEHIANLAGSPAIKKGILQTVKVVDELVKVMGRHKPENIVIEMARENQTTQKGQKNSRERMKRIEEGIKELGSQILKEHPVENTQLQNEKLYLYYLQNGRDMYVDQELDINRLSDYDVDHIVPQSFLKDDSIDNKVLTRSDKNRGKSDNVPSEEVVKKMKNYWRQLLNAKLITQRKFDNLTKAERGGLSELDKAGFIKRQLVETRQITKHVAQILDSRMNTKYDENDKLIREVKVITLKSKLVSDFRKDFQFYKVREINNYHHAHDAYLNAVVGTALIKKYPKTAHAEIMALRQGGLVMQNYRLIDATLYVTFEPCVMCAGAMIHSRIGRVVFGVRNAKTGAAGSLMDVLHYPGMNHRVEITEGILADECAALLCYFFRMPRQVFNAQKKAQSSTDGSSGSETPGTSESATPESSGSEVEFSHEYWMRHALTLAKRARDEREVPVGAVLVLNNRVIGEGWNRAIGLHDPLESEFVYGDYKVYDVRKMIAKSEQEIGKATAKYFFYSNIMNFFKTEITLANGEIRKRPLIETNGETGEIVWDKGRDFATVRKVLSMPQVNIVKKTEVQTGGFSKESILPKRNSDKLIARKKDWDPKKYGGFDSPTVAYSVLVVAKVEKGKSKKLKSVKELLGITIMERSSFEKNPIDFLEAKGYKEVKKDLIIKLPKYSLFELENGRKRMLASAGELQKGNELALPSKYVNFLYLASHYEKLKGSPEDNEQKQLFVEQHKHYLDEIIEQISEFSKRVILADANLDKVLSAYNKHRDKPIREQAENIIHLFTLTNLGAPAAFKYFDTTIDRKRYTSTKEVLDATLIHQSITGLYETRIDLSQLGGD

SEQ ID NO: 303 - protein, 1554 aa, synthetic construct
  REGION 1..1554: note = 127 TadA CP65ins 1016 polypeptide sequence
MDKKYSIGLAIGTNSVGWAVITDEYKVPSKKFKVLGNTDRHSIKKNLIGALLFDSGETAEATRLKRTARRRYTRRKNRICYLQEIFSNEMAKVDDSFFHRLEESFLVEEDKKHERHPIFGNIVDEVAYHEKYPTIYHLRKKLVDSTDKADLRLIYLALAHMIKFRGHFLIEGDLNPDNSDVDKLFIQLVQTYNQLFEENPINASGVDAKAILSARLSKSRRLENLIAQLPGEKKNGLFGNLIALSLGLTPNFKSNFDLAEDAKLQLSKDTYDDDLDNLLAQIGDQYADLFLAAKNLSDAILLSDILRVNTEITKAPLSASMIKRYDEHHQDLTLLKALVRQQLPEKYKEIFFDQSKNGYAGYIDGGASQEEFYKFIKPILEKMDGTEELLVKLNREDLLRKQRTFDNGSIPHQIHLGELHAILRRQEDFYPFLKDNREKIEKILTFRIPYYVGPLARGNSRFAWMTRKSEETITPWNFEEVVDKGASAQSFIERMTNFDKNLPNEKVLPKHSLLYEYFTVYNELTKVKYVTEGMRKPAFLSGEQKKAIVDLLFKTNRKVTVKQLKEDYFKKIECFDSVEISGVEDRFNASLGTYHDLLKIIKDKDFLDNEENEDILEDIVLTLTLFEDREMIEERLKTYAHLFDDKVMKQLKRRRYTGWGRLSRKLINGIRDKQSGKTILDFLKSDGFANRNFMQLIHDDSLTFKEDIQKAQVSGQGDSLHEHIANLAGSPAIKKGILQTVKVVDELVKVMGRHKPENIVIEMARENQTTQKGQKNSRERMKRIEEGIKELGSQILKEHPVENTQLQNEKLYLYYLQNGRDMYVDQELDINRLSDYDVDHIVPQSFLKDDSIDNKVLTRSDKNRGKSDNVPSEEVVKKMKNYWRQLLNAKLITQRKFDNLTKAERGGLSELDKAGFIKRQLVETRQITKHVAQILDSRMNTKYDENDKLIREVKVITLKSKLVSDFRKDFQFYKVREINNYHHAHDAYLNAVVGTALIKKYPKLESEFVYGDYKVTAHAEIMALRQGGLVMQNYRLIDATLYVTFEPCVMCAGAMIHSRIGRVVFGVRNAKTGAAGSLMDVLHYPGMNHRVEITEGILADECAALLCYFFRMPRQVFNAQKKAQSSTDGSSGSETPGTSESATPESSGSEVEFSHEYWMRHALTLAKRARDEREVPVGAVLVLNNRVIGEGWNRAIGLHDPYDVRKMIAKSEQEIGKATAKYFFYSNIMNFFKTEITLANGEIRKRPLIETNGETGEIVWDKGRDFATVRKVLSMPQVNIVKKTEVQTGGFSKESILPKRNSDKLIARKKDWDPKKYGGFDSPTVAYSVLVVAKVEKGKSKKLKSVKELLGITIMERSSFEKNPIDFLEAKGYKEVKKDLIIKLPKYSLFELENGRKRMLASAGELQKGNELALPSKYVNFLYLASHYEKLKGSPEDNEQKQLFVEQHKHYLDEIIEQISEFSKRVILADANLDKVLSAYNKHRDKPIREQAENIIHLFTLTNLGAPAAFKYFDTTIDRKRYTSTKEVLDATLIHQSITGLYETRIDLSQLGGD

SEQ ID NO: 304 - protein, 1554 aa, synthetic construct
  REGION 1..1554: note = 128 TadA CP65ins 1022 polypeptide sequence
MDKKYSIGLAIGTNSVGWAVITDEYKVPSKKFKVLGNTDRHSIKKNLIGALLFDSGETAEATRLKRTARRRYTRRKNRICYLQEIFSNEMAKVDDSFFHRLEESFLVEEDKKHERHPIFGNIVDEVAYHEKYPTIYHLRKKLVDSTDKADLRLIYLALAHMIKFRGHFLIEGDLNPDNSDVDKLFIQLVQTYNQLFEENPINASGVDAKAILSARLSKSRRLENLIAQLPGEKKNGLFGNLIALSLGLTPNFKSNFDLAEDAKLQLSKDTYDDDLDNLLAQIGDQYADLFLAAKNLSDAILLSDILRVNTEITKAPLSASMIKRYDEHHQDLTLLKALVRQQLPEKYKEIFFDQSKNGYAGYIDGGASQEEFYKFIKPILEKMDGTEELLVKLNREDLLRKQRTFDNGSIPHQIHLGELHAILRRQEDFYPFLKDNREKIEKILTFRIPYYVGPLARGNSRFAWMTRKSEETITPWNFEEVVDKGASAQSFIERMTNFDKNLPNEKVLPKHSLLYEYFTVYNELTKVKYVTEGMRKPAFLSGEQKKAIVDLLFKTNRKVTVKQLKEDYFKKIECFDSVEISGVEDRFNASLGTYHDLLKIIKDKDFLDNEENEDILEDIVLTLTLFEDREMIEERLKTYAHLFDDKVMKQLKRRRYTGWGRLSRKLINGIRDKQSGKTILDFLKSDGFANRNFMQLIHDDSLTFKEDIQKAQVSGQGDSLHEHIANLAGSPAIKKGILQTVKVVDELVKVMGRHKPENIVIEMARENQTTQKGQKNSRERMKRIEEGIKELGSQILKEHPVENTQLQNEKLYLYYLQNGRDMYVDQELDINRLSDYDVDHIVPQSFLKDDSIDNKVLTRSDKNRGKSDNVPSEEVVKKMKNYWRQLLNAKLITQRKFDNLTKAERGGLSELDKAGFIKRQLVETRQITKHVAQILDSRMNTKYDENDKLIREVKVITLKSKLVSDFRKDFQFYKVREINNYHHAHDAYLNAVVGTALIKKYPKLESEFVYGDYKVYDVRKMITAHAEIMALRQGGLVMQNYRLIDATLYVTFEPCVMCAGAMIHSRIGRVVFGVRNAKTGAAGSLMDVLHYPGMNHRVEITEGILADECAALLCYFFRMPRQVFNAQKKAQSSTDGSSGSETPGTSESATPESSGSEVEFSHEYWMRHALTLAKRARDEREVPVGAVLVLNNRVIGEGWNRAIGLHDPAKSEQEIGKATAKYFFYSNIMNFFKTEITLANGEIRKRPLIETNGETGEIVWDKGRDFATVRKVLSMPQVNIVKKTEVQTGGFSKESILPKRNSDKLIARKKDWDPKKYGGFDSPTVAYSVLVVAKVEKGKSKKLKSVKELLGITIMERSSFEKNPIDFLEAKGYKEVKKDLIIKLPKYSLFELENGRKRMLASAGELQKGNELALPSKYVNFLYLASHYEKLKGSPEDNEQKQLFVEQHKHYLDEIIEQISEFSKRVILADANLDKVLSAYNKHRDKPIREQAENIIHLFTLTNLGAPAAFKYFDTTIDRKRYTSTKEVLDATLIHQSITGLYETRIDLSQLGGD

SEQ ID NO: 305 - protein, 1554 aa, synthetic construct
  REGION 1..1554: note = 129 TadA CP65ins 1029 polypeptide sequence
MDKKYSIGLAIGTNSVGWAVITDEYKVPSKKFKVLGNTDRHSIKKNLIGALLFDSGETAEATRLKRTARRRYTRRKNRICYLQEIFSNEMAKVDDSFFHRLEESFLVEEDKKHERHPIFGNIVDEVAYHEKYPTIYHLRKKLVDSTDKADLRLIYLALAHMIKFRGHFLIEGDLNPDNSDVDKLFIQLVQTYNQLFEENPINASGVDAKAILSARLSKSRRLENLIAQLPGEKKNGLFGNLIALSLGLTPNFKSNFDLAEDAKLQLSKDTYDDDLDNLLAQIGDQYADLFLAAKNLSDAILLSDILRVNTEITKAPLSASMIKRYDEHHQDLTLLKALVRQQLPEKYKEIFFDQSKNGYAGYIDGGASQEEFYKFIKPILEKMDGTEELLVKLNREDLLRKQRTFDNGSIPHQIHLGELHAILRRQEDFYPFLKDNREKIEKILTFRIPYYVGPLARGNSRFAWMTRKSEETITPWNFEEVVDKGASAQSFIERMTNFDKNLPNEKVLPKHSLLYEYFTVYNELTKVKYVTEGMRKPAFLSGEQKKAIVDLLFKTNRKVTVKQLKEDYFKKIECFDSVEISGVEDRFNASLGTYHDLLKIIKDKDFLDNEENEDILEDIVLTLTLFEDREMIEERLKTYAHLFDDKVMKQLKRRRYTGWGRLSRKLINGIRDKQSGKTILDFLKSDGFANRNFMQLIHDDSLTFKEDIQKAQVSGQGDSLHEHIANLAGSPAIKKGILQTVKVVDELVKVMGRHKPENIVIEMARENQTTQKGQKNSRERMKRIEEGIKELGSQILKEHPVENTQLQNEKLYLYYLQNGRDMYVDQELDINRLSDYDVDHIVPQSFLKDDSIDNKVLTRSDKNRGKSDNVPSEEVVKKMKNYWRQLLNAKLITQRKFDNLTKAERGGLSELDKAGFIKRQLVETRQITKHVAQILDSRMNTKYDENDKLIREVKVITLKSKLVSDFRKDFQFYKVREINNYHHAHDAYLNAVVGTALIKKYPKLESEFVYGDYKVYDVRKMIAKSEQEITAHAEIMALRQGGLVMQNYRLIDATLYVTFEPCVMCAGAMIHSRIGRVVFGVRNAKTGAAGSLMDVLHYPGMNHRVEITEGILADECAALLCYFFRMPRQVFNAQKKAQSSTDGSSGSETPGTSESATPESSGSEVEFSHEYWMRHALTLAKRARDEREVPVGAVLVLNNRVIGEGWNRAIGLHDPGKATAKYFFYSNIMNFFKTEITLANGEIRKRPLIETNGETGEIVWDKGRDFATVRKVLSMPQVNIVKKTEVQTGGFSKESILPKRNSDKLIARKKDWDPKKYGGFDSPTVAYSVLVVAKVEKGKSKKLKSVKELLGITIMERSSFEKNPIDFLEAKGYKEVKKDLIIKLPKYSLFELENGRKRMLASAGELQKGNELALPSKYVNFLYLASHYEKLKGSPEDNEQKQLFVEQHKHYLDEIIEQISEFSKRVILADANLDKVLSAYNKHRDKPIREQAENIIHLFTLTNLGAPAAFKYFDTTIDRKRYTSTKEVLDATLIHQSITGLYETRIDLSQLGGD

SEQ ID NO: 306 - protein, 1554 aa, synthetic construct
  REGION 1..1554: note = 130 TadA CP65ins 1041 polypeptide sequence
MDKKYSIGLAIGTNSVGWAVITDEYKVPSKKFKVLGNTDRHSIKKNLIGALLFDSGETAEATRLKRTARRRYTRRKNRICYLQEIFSNEMAKVDDSFFHRLEESFLVEEDKKHERHPIFGNIVDEVAYHEKYPTIYHLRKKLVDSTDKADLRLIYLALAHMIKFRGHFLIEGDLNPDNSDVDKLFIQLVQTYNQLFEENPINASGVDAKAILSARLSKSRRLENLIAQLPGEKKNGLFGNLIALSLGLTPNFKSNFDLAEDAKLQLSKDTYDDDLDNLLAQIGDQYADLFLAAKNLSDAILLSDILRVNTEITKAPLSASMIKRYDEHHQDLTLLKALVRQQLPEKYKEIFFDQSKNGYAGYIDGGASQEEFYKFIKPILEKMDGTEELLVKLNREDLLRKQRTFDNGSIPHQIHLGELHAILRRQEDFYPFLKDNREKIEKILTFRIPYYVGPLARGNSRFAWMTRKSEETITPWNFEEVVDKGASAQSFIERMTNFDKNLPNEKVLPKHSLLYEYFTVYNELTKVKYVTEGMRKPAFLSGEQKKAIVDLLFKTNRKVTVKQLKEDYFKKIECFDSVEISGVEDRFNASLGTYHDLLKIIKDKDFLDNEENEDILEDIVLTLTLFEDREMIEERLKTYAHLFDDKVMKQLKRRRYTGWGRLSRKLINGIRDKQSGKTILDFLKSDGFANRNFMQLIHDDSLTFKEDIQKAQVSGQGDSLHEHIANLAGSPAIKKGILQTVKVVDELVKVMGRHKPENIVIEMARENQTTQKGQKNSRERMKRIEEGIKELGSQILKEHPVENTQLQNEKLYLYYLQNGRDMYVDQELDINRLSDYDVDHIVPQSFLKDDSIDNKVLTRSDKNRGKSDNVPSEEVVKKMKNYWRQLLNAKLITQRKFDNLTKAERGGLSELDKAGFIKRQLVETRQITKHVAQILDSRMNTKYDENDKLIREVKVITLKSKLVSDFRKDFQFYKVREINNYHHAHDAYLNAVVGTALIKKYPKLESEFVYGDYKVYDVRKMIAKSEQEIGKATAKYFFYSTAHAEIMALRQGGLVMQNYRLIDATLYVTFEPCVMCAGAMIHSRIGRVVFGVRNAKTGAAGSLMDVLHYPGMNHRVEITEGILADECAALLCYFFRMPRQVFNAQKKAQSSTDGSSGSETPGTSESATPESSGSEVEFSHEYWMRHALTLAKRARDEREVPVGAVLVLNNRVIGEGWNRAIGLHDPNIMNFFKTEITLANGEIRKRPLIETNGETGEIVWDKGRDFATVRKVLSMPQVNIVKKTEVQTGGFSKESILPKRNSDKLIARKKDWDPKKYGGFDSPTVAYSVLVVAKVEKGKSKKLKSVKELLGITIMERSSFEKNPIDFLEAKGYKEVKKDLIIKLPKYSLFELENGRKRMLASAGELQKGNELALPSKYVNFLYLASHYEKLKGSPEDNEQKQLFVEQHKHYLDEIIEQISEFSKRVILADANLDKVLSAYNKHRDKPIREQAENIIHLFTLTNLGAPAAFKYFDTTIDRKRYTSTKEVLDATLIHQSITGLYETRIDLSQLGGD

SEQ ID NO: 307 - protein, 1554 aa, synthetic construct
  REGION 1..1554: note = 131 TadA CP65ins 1054 polypeptide sequence
MDKKYSIGLAIGTNSVGWAVITDEYKVPSKKFKVLGNTDRHSIKKNLIGALLFDSGETAEATRLKRTARRRYTRRKNRICYLQEIFSNEMAKVDDSFFHRLEESFLVEEDKKHERHPIFGNIVDEVAYHEKYPTIYHLRKKLVDSTDKADLRLIYLALAHMIKFRGHFLIEGDLNPDNSDVDKLFIQLVQTYNQLFEENPINASGVDAKAILSARLSKSRRLENLIAQLPGEKKNGLFGNLIALSLGLTPNFKSNFDLAEDAKLQLSKDTYDDDLDNLLAQIGDQYADLFLAAKNLSDAILLSDILRVNTEITKAPLSASMIKRYDEHHQDLTLLKALVRQQLPEKYKEIFFDQSKNGYAGYIDGGASQEEFYKFIKPILEKMDGTEELLVKLNREDLLRKQRTFDNGSIPHQIHLGELHAILRRQEDFYPFLKDNREKIEKILTFRIPYYVGPLARGNSRFAWMTRKSEETITPWNFEEVVDKGASAQSFIERMTNFDKNLPNEKVLPKHSLLYEYFTVYNELTKVKYVTEGMRKPAFLSGEQKKAIVDLLFKTNRKVTVKQLKEDYFKKIECFDSVEISGVEDRFNASLGTYHDLLKIIKDKDFLDNEENEDILEDIVLTLTLFEDREMIEERLKTYAHLFDDKVMKQLKRRRYTGWGRLSRKLINGIRDKQSGKTILDFLKSDGFANRNFMQLIHDDSLTFKEDIQKAQVSGQGDSLHEHIANLAGSPAIKKGILQTVKVVDELVKVMGRHKPENIVIEMARENQTTQKGQKNSRERMKRIEEGIKELGSQILKEHPVENTQLQNEKLYLYYLQNGRDMYVDQELDINRLSDYDVDHIVPQSFLKDDSIDNKVLTRSDKNRGKSDNVPSEEVVKKMKNYWRQLLNAKLITQRKFDNLTKAERGGLSELDKAGFIKRQLVETRQITKHVAQILDSRMNTKYDENDKLIREVKVITLKSKLVSDFRKDFQFYKVREINNYHHAHDAYLNAVVGTALIKKYPKLESEFVYGDYKVYDVRKMIAKSEQEIGKATAKYFFYSNIMNFFKTEITLANTAHAEIMALRQGGLVMQNYRLIDATLYVTFEPCVMCAGAMIHSRIGRVVFGVRNAKTGAAGSLMDVLHYPGMNHRVEITEGILADECAALLCYFFRMPRQVFNAQKKAQSSTDGSSGSETPGTSESATPESSGSEVEFSHEYWMRHALTLAKRARDEREVPVGAVLVLNNRVIGEGWNRAIGLHDPGEIRKRPLIETNGETGEIVWDKGRDFATVRKVLSMPQVNIVKKTEVQTGGFSKESILPKRNSDKLIARKKDWDPKKYGGFDSPTVAYSVLVVAKVEKGKSKKLKSVKELLGITIMERSSFEKNPIDFLEAKGYKEVKKDLIIKLPKYSLFELENGRKRMLASAGELQKGNELALPSKYVNFLYLASHYEKLKGSPEDNEQKQLFVEQHKHYLDEIIEQISEFSKRVILADANLDKVLSAYNKHRDKPIREQAENIIHLFTLTNLGAPAAFKYFDTTIDRKRYTSTKEVLDATLIHQSITGLYETRIDLSQLGGD

SEQ ID NO: 308 - protein, 1554 aa, synthetic construct
  REGION 1..1554: note = 132 TadA CP65ins 1246 polypeptide sequence
MDKKYSIGLAIGTNSVGWAVITDEYKVPSKKFKVLGNTDRHSIKKNLIGALLFDSGETAEATRLKRTARRRYTRRKNRICYLQEIFSNEMAKVDDSFFHRLEESFLVEEDKKHERHPIFGNIVDEVAYHEKYPTIYHLRKKLVDSTDKADLRLIYLALAHMIKFRGHFLIEGDLNPDNSDVDKLFIQLVQTYNQLFEENPINASGVDAKAILSARLSKSRRLENLIAQLPGEKKNGLFGNLIALSLGLTPNFKSNFDLAEDAKLQLSKDTYDDDLDNLLAQIGDQYADLFLAAKNLSDAILLSDILRVNTEITKAPLSASMIKRYDEHHQDLTLLKALVRQQLPEKYKEIFFDQSKNGYAGYIDGGASQEEFYKFIKPILEKMDGTEELLVKLNREDLLRKQRTFDNGSIPHQIHLGELHAILRRQEDFYPFLKDNREKIEKILTFRIPYYVGPLARGNSRFAWMTRKSEETITPWNFEEVVDKGASAQSFIERMTNFDKNLPNEKVLPKHSLLYEYFTVYNELTKVKYVTEGMRKPAFLSGEQKKAIVDLLFKTNRKVTVKQLKEDYFKKIECFDSVEISGVEDRFNASLGTYHDLLKIIKDKDFLDNEENEDILEDIVLTLTLFEDREMIEERLKTYAHLFDDKVMKQLKRRRYTGWGRLSRKLINGIRDKQSGKTILDFLKSDGFANRNFMQLIHDDSLTFKEDIQKAQVSGQGDSLHEHIANLAGSPAIKKGILQTVKVVDELVKVMGRHKPENIVIEMARENQTTQKGQKNSRERMKRIEEGIKELGSQILKEHPVENTQLQNEKLYLYYLQNGRDMYVDQELDINRLSDYDVDHIVPQSFLKDDSIDNKVLTRSDKNRGKSDNVPSEEVVKKMKNYWRQLLNAKLITQRKFDNLTKAERGGLSELDKAGFIKRQLVETRQITKHVAQILDSRMNTKYDENDKLIREVKVITLKSKLVSDFRKDFQFYKVREINNYHHAHDAYLNAVVGTALIKKYPKLESEFVYGDYKVYDVRKMIAKSEQEIGKATAKYFFYSNIMNFFKTEITLANGEIRKRPLIETNGETGEIVWDKGRDFATVRKVLSMPQVNIVKKTEVQTGGFSKESILPKRNSDKLIARKKDWDPKKYGGFDSPTVAYSVLVVAKVEKGKSKKLKSVKELLGITIMERSSFEKNPIDFLEAKGYKEVKKDLIIKLPKYSLFELENGRKRMLASAGELQKGNELALPSKYVNFLYLASHYEKLKGTAHAEIMALRQGGLVMQNYRLIDATLYVTFEPCVMCAGAMIHSRIGRVVFGVRNAKTGAAGSLMDVLHYPGMNHRVEITEGILADECAALLCYFFRMPRQVFNAQKKAQSSTDGSSGSETPGTSESATPESSGSEVEFSHEYWMRHALTLAKRARDEREVPVGAVLVLNNRVIGEGWNRAIGLHDPSPEDNEQKQLFVEQHKHYLDEIIEQISEFSKRVILADANLDKVLSAYNKHRDKPIREQAENIIHLFTLTNLGAPAAFKYFDTTIDRKRYTSTKEVLDATLIHQSITGLYETRIDLSQLGGD

SEQ ID NO: 309 - protein, 160 aa, Staphylococcus aureus
  REGION 1..160: note = MISC_FEATURE - TadA polypeptide sequence
MGSHMTNDIYFMTLAIEEAKKAAQLGEVPIGAIITKDDEVIARAHNLRETLQQPTAHAEHIAIERAAKVLGSWRLEGCTLYVTLEPCVMCAGTIVMSRIPRVVYGADDPKGGCSGSLMNLLQQSNFNHRAIVDKGVLKEACSTLLTTFFKNLRANKKSTN

SEQ ID NO: 310 - protein, 161 aa, Bacillus subtilis
  REGION 1..161: note = MISC_FEATURE - TadA polypeptide sequence
MTQDELYMKEAIKEAKKAEEKGEVPIGAVLVINGEIIARAHNLRETEQRSIAHAEMLVIDEACKALGTWRLEGATLYVTLEPCPMCAGAVVLSRVEKVVFGAFDPKGGCSGTLMNLLQEERFNHQAEVVSGVLEEECGGMLSAFFRELRKKKKAARKNLSE

SEQ ID NO: 311 - protein, 183 aa, Salmonella enterica
  REGION 1..183: note = MISC_FEATURE - TadA polypeptide sequence
  source 1..183: note = serovar Typhimurium
MPPAFITGVTSLSDVELDHEYWMRHALTLAKRAWDEREVPVGAVLVHNHRVIGEGWNRPIGRHDPTAHAEIMALRQGGLVLQNYRLLDTTLYVTLEPCVMCAGAMVHSRIGRVVFGARDAKTGAAGSLIDVLHHPGMNHRVEIIEGVLRDECATLLSDFFRMRRQEIKALKKADRAEGAGPAV

SEQ ID NO: 312 - protein, 164 aa, Shewanella putrefaciens
  REGION 1..164: note = MISC_FEATURE - TadA polypeptide sequence
MDEYWMQVAMQMAEKAEAAGEVPVGAVLVKDGQQIATGYNLSISQHDPTAHAEILCLRSAGKKLENYRLLDATLYITLEPCAMCAGAMVHSRIARVVYGARDEKTGAAGTVVNLLQHPAFNHQVEVTSGVLAEACSAQLSRFFKRRRDEKKALKLAQRAQQGIE

SEQ ID NO: 313 - protein, 173 aa, Haemophilus influenzae
  REGION 1..173: note = MISC_FEATURE - TadA polypeptide sequence
MDAAKVRSEFDEKMMRYALELADKAEALGEIPVGAVLVDDARNIIGEGWNLSIVQSDPTAHAEIIALRNGAKNIQNYRLLNSTLYVTLEPCTMCAGAILHSRIKRLVFGASDYKTGAIGSRFHFFDDYKMNHTLEITSGVLAEECSQKLSTFFQKRREEKKIEKALLKSLSDK

SEQ ID NO: 314 - protein, 161 aa, Caulobacter crescentus
  REGION 1..161: note = MISC_FEATURE - TadA polypeptide sequence
MRTDESEDQDHRMMRLALDAARAAAEAGETPVGAVILDPSTGEVIATAGNGPIAAHDPTAHAEIAAMRAAAAKLGNYRLTDLTLVVTLEPCAMCAGAISHARIGRVVFGADDPKGGAVVHGPKFFAQPTCHWRPEVTGGVLADESADLLRGFFRARRKAKI

SEQ ID NO: 315 - protein, 179 aa, Geobacter sulfurreducens
  REGION 1..179: note = MISC_FEATURE - TadA polypeptide sequence
MSSLKKTPIRDDAYWMGKAIREAAKAAARDEVPIGAVIVRDGAVIGRGHNLREGSNDPSAHAEMIAIRQAARRSANWRLTGATLYVTLEPCLMCMGAIILARLERVVFGCYDPKGGAAGSLYDLSADPRLNHQVRLSPGVCQEECGTMLSDFFRDLRRRKKAKATPALFIDERKVPPEP

SEQ ID NO: 316 - protein, 167 aa, synthetic construct
  REGION 1..167: note = TadA*8 polypeptide sequence
MSEVEFSHEYWMRHALTLAKRARDEREVPVGAVLVLNNRVIGEGWNRAIGLHDPTAHAEIMALRQGGLVMQNYRLIDATLYVTFEPCVMCAGAMIHSRIGRVVFGVRNAKTGAAGSLMDVLHYPGMNHRVEITEGILADECAALLCTFFRMPRQVFNAQKKAQSSTD

SEQ ID NO: 317 - RNA, 80 nt, synthetic construct
  misc_feature 1..80: note = gRNA scaffold polynucleotide sequence
  source 1..80: mol_type = other RNA
gttttagagctagaaatagcaagttaaaataaggctagtccgttatcaacttgaaaaagtggcaccgagtcggtgctttt

SEQ ID NO: 318 - RNA, 125 nt, synthetic construct
  misc_feature 1..125: note = gRNA scaffold polynucleotide sequence
  source 1..125: mol_type = other RNA
gtttttgtactctcaagatttaagtaactgtacaacgaaacttacacagttacttaaatcttgcagaagctacaaagataaggcttcatgccgaaatcaacaccctgtcattttatggcagggtg

SEQ ID NO: 319 - RNA, 76 nt, Streptococcus pyogenes
  misc_feature 1..76: note = S. pyogenes gRNA scaffold oligonucleotide sequence
  source 1..76: mol_type = other RNA
gttttagagctagaaatagcaagttaaaataaggctagtccgttatcaacttgaaaaagtggcaccgagtcggtgc

SEQ ID NO: 320 - RNA, 84 nt, Staphylococcus aureus
  misc_feature 1..84: note = S. aureus gRNA scaffold oligonucleotide sequence
  source 1..84: mol_type = other RNA
gttttagtactctgtaatgaaaattacagaatctactaaaacaaggcaaaatgccgtgtttatctcgtcaacttgttggcgaga

SEQ ID NO: 321 - RNA, 97 nt, Bacillus hisashii
  misc_feature 1..97: note = BhCas12b gRNA scaffold oligonucleotide sequence
  source 1..97: mol_type = other RNA
gttctgtcttttggtcaggacaaccgtctagctataagtgctgcagggtgtgagaaactcctattgctggacgatgtctcttacgaggcattagcac

SEQ ID NO: 322 - RNA, 88 nt, Bacillus sp.
  misc_feature 1..88: note = BvCas12b gRNA scaffold oligonucleotide sequence
  source 1..88: mol_type = other RNA
gacctatagggtcaatgaatctgtgcgtgtgccataagtaattaaaaattacccaccacaggagcacctgaaaacaggtgcttggcac

SEQ ID NO: 323 - RNA, 80 nt, synthetic construct
  misc_feature 1..80: note = gRNA scaffold nucleotide sequence; oligonucleotide sequence
  modified_base 78..80: mod_base = um
  misc_feature 78..80: note = In embodiments, a nucleotide(s) is linked to the preceding 5' nucleotide by a 3' phosphorothioate internucleotide linkage
  source 1..80: mol_type = other RNA
gttttagagctagaaatagcaagttaaaataaggctagtccgttatcaacttgaaaaagtgggaccgagtcggtgctttt

SEQ ID NO: 324 - RNA, 80 nt, synthetic construct; identical to SEQ ID NO: 317
  misc_feature 1..80: note = gRNA scaffold nucleotide sequence
  misc_feature 78..80: note = In embodiments, a nucleotide(s) is linked to the preceding 5' nucleotide by a 3' phosphorothioate internucleotide linkage
  modified_base 78..80: mod_base = um
  source 1..80: mol_type = other RNA

SEQ ID NO: 325 - RNA, 117 nt, Bacillus hisashii
  misc_feature 1..117: note = BhCas12b gRNA scaffold + guide sequence; oligonucleotide sequence
  misc_feature 1..97: note = BhCas12b sgRNA scaffold
  source 1..117: mol_type = other RNA
gttctgtcttttggtcaggacaaccgtctagctataagtgctgcagggtgtgagaaactcctattgctggacgatgtctcttacgaggcattagcacnnnnnnnnnnnnnnnnnnnn

SEQ ID NO: 326 - RNA, 108 nt, Bacillus sp.
  misc_feature 1..108: note = BvCas12b gRNA scaffold + guide sequence; oligonucleotide sequence
  misc_feature 1..88: note = BvCas12b gRNA scaffold
  source 1..108: mol_type = other RNA
gacctatagggtcaatgaatctgtgcgtgtgccataagtaattaaaaattacccaccacaggagcacctgaaaacaggtgcttggcacnnnnnnnnnnnnnnnnnnnn

SEQ ID NO: 327 - RNA, 119 nt, Alicyclobacillus acidiphilus
  misc_feature 1..119: note = AaCas12b gRNA scaffold + guide sequence; oligonucleotide sequence
  misc_feature 1..99: note = AaCas12b gRNA scaffold
  source 1..119: mol_type = other RNA
gtctaaaggacagaatttttcaacgggtgtgccaatggccactttccaggtggcaaagcccgttgaacttctcaaaaagaacgatctgagaagtggcacnnnnnnnnnnnnnnnnnnnn

SEQ ID NO: 328 - protein, 29 aa, synthetic construct
  REGION 1..29: note = synthetic polypeptide sequence
PKKKRKVEGADKRTADGSEFESPKKKRKV

SEQ ID NO: 329 - protein, 23 aa, synthetic construct
  REGION 1..23: note = synthetic peptide sequence
RKSGKIAAIVVKRPRKPKKKRKV

SEQ ID NO: 330 - protein, 8 aa, synthetic construct
  REGION 1..8: note = synthetic peptide sequence
SGGSSGGS

SEQ ID NO: 331 - protein, 1609 aa, synthetic construct
  REGION 1..1609: note = pNMG-B335ABE8.1_Y147T_CP5_NGC PAM_monomer polypeptide sequence
MSEVEFSHEYWMRHALTLAKRARDEREVPVGAVLVLNNRVIGEGWNRAIGLHDPTAHAEIMALRQGGLVMQNYRLIDATLYVTFEPCVMCAGAMIHSRIGRVVFGVRNAKTGAAGSLMDVLHYPGMNHRVEITEGILADECAALLCTFFRMPRQVFNAQKKAQSSTDSGGSSGGSSGSETPGTSESATPESSGGSSGGSEIGKATAKYFFYSNIMNFFKTEITLANGEIRKRPLIETNGETGEIVWDKGRDFATVRKVLSMPQVNIVKKTEVQTGGFSKESILPKRNSDKLIARKKDWDPKKYGGFMQPTVAYSVLVVAKVEKGKSKKLKSVKELLGITIMERSSFEKNPIDFLEAKGYKEVKKDLIIKLPKYSLFELENGRKRMLASAKFLQKGNELALPSKYVNFLYLASHYEKLKGSPEDNEQKQLFVEQHKHYLDEIIEQISEFSKRVILADANLDKVLSAYNKHRDKPIREQAENIIHLFTLTNLGAPRAFKYFDTTIARKEYRSTKEVLDATLIHQSITGLYETRIDLSQLGGDGGSGGSGGSGGSGGSGGSGGMDKKYSIGLAIGTNSVGWAVITDEYKVPSKKFKVLGNTDRHSIKKNLIGALLFDSGETAEATRLKRTARRRYTRRKNRICYLQEIFSNEMAKVDDSFFHRLEESFLVEEDKKHERHPIFGNIVDEVAYHEKYPTIYHLRKKLVDSTDKADLRLIYLALAHMIKFRGHFLIEGDLNPDNSDVDKLFIQLVQTYNQLFEENPINASGVDAKAILSARLSKSRRLENLIAQLPGEKKNGLFGNLIALSLGLTPNFKSNFDLAEDAKLQLSKDTYDDDLDNLLAQIGDQYADLFLAAKNLSDAILLSDILRVNTEITKAPLSASMIKRYDEHHQDLTLLKALVRQQLPEKYKEIFFDQSKNGYAGYIDGGASQEEFYKFIKPILEKMDGTEELLVKLNREDLLRKQRTFDNGSIPHQIHLGELHAILRRQEDFYPFLKDNREKIEKILTFRIPYYVGPLARGNSRFAWMTRKSEETITPWNFEEVVDKGASAQSFIERMTNFDKNLPNEKVLPKHSLLYEYFTVYNELTKVKYVTEGMRKPAFLSGEQKKAIVDLLFKTNRKVTVKQLKEDYFKKIECFDSVEISGVEDRFNASLGTYHDLLKIIKDKDFLDNEENEDILEDIVLTLTLFEDREMIEERLKTYAHLFDDKVMKQLKRRRYTGWGRLSRKLINGIRDKQSGKTILDFLKSDGFANRNFMQLIHDDSLTFKEDIQKAQVSGQGDSLHEHIANLAGSPAIKKGILQTVKVVDELVKVMGRHKPENIVIEMARENQTTQKGQKNSRERMKRIEEGIKELGSQILKEHPVENTQLQNEKLYLYYLQNGRDMYVDQELDINRLSDYDVDHIVPQSFLKDDSIDNKVLTRSDKNRGKSDNVPSEEVVKKMKNYWRQLLNAKLITQRKFDNLTKAERGGLSELDKAGFIKRQLVETRQITKHVAQILDSRMNTKYDENDKLIREVKVITLKSKLVSDFRKDFQFYKVREINNYHHAHDAYLNAVVGTALIKKYPKLESEFVYGDYKVYDVRKMIAKSEQEGADKRTADGSEFESPKKKRKV

SEQ ID NO: 332 - protein, 1807 aa, synthetic construct
  REGION 1..1807: note = pNMG-357_ABE8.14 with NGC PAMCP5 polypeptide sequence
  REGION 1..174: note = MISC_FEATURE - Adenosine deaminase sequence
  REGION 175..198: note = MISC_FEATURE - Linker sequence
  REGION 199..365: note = MISC_FEATURE - Adenosine deaminase sequence
  REGION 366..397: note = MISC_FEATURE - Linker sequence
  REGION 398..738: note = MISC_FEATURE - Sequence derived from Cas9
  REGION 739..759: note = MISC_FEATURE - Linker sequence
  REGION 760..1785: note = MISC_FEATURE - Sequence derived from Cas9
  REGION 1786..1807: note = MISC_FEATURE - Bipartite nuclear localization sequence
MSEVEFSHEYWMRHALTLAKRAWDEREVPVGAVLVHNNRVIGEGWNRPIGRHDPTAHAEIMALRQGGLVMQNYRLIDATLYVTLEPCVMCAGAMIHSRIGRVVFGARDAKTGAAGSLMDVLHHPGMNHRVEITEGILADECAALLSDFFRMRRQEIKAQKKAQSSTDGGSSGGSSGSETPGTSESATPESSGGSSGGSMSEVEFSHEYWMRHALTLAKRARDEREVPVGAVLVLNNRVIGEGWNRAIGLHDPTAHAEIMALRQGGLVMQNYRLIDATLYVTFEPCVMCAGAMIHSRIGRVVFGVRNAKTGAAGSLMDVLHYPGMNHRVEITEGILADECAALLCTFFRMPRQVFNAQKKAQSSTDSGGSSGGSSGSETPGTSESATPESSGGSSGGSEIGKATAKYFFYSNIMNFFKTEITLANGEIRKRPLIETNGETGEIVWDKGRDFATVRKVLSMPQVNIVKKTEVQTGGFSKESILPKRNSDKLIARKKDWDPKKYGGFMQPTVAYSVLVVAKVEKGKSKKLKSVKELLGITIMERSSFEKNPIDFLEAKGYKEVKKDLIIKLPKYSLFELENGRKRMLASAKFLQKGNELALPSKYVNFLYLASHYEKLKGSPEDNEQKQLFVEQHKHYLDEIIEQISEFSKRVILADANLDKVLSAYNKHRDKPIREQAENIIHLFTLTNLGAPRAFKYFDTTIARKEYRSTKEVLDATLIHQSITGLYETRIDLSQLGGDGGSGGSGGSGGSGGSGGSGGMDKKYSIGLAIGTNSVGWAVITDEYKVPSKKFKVLGNTDRHSIKKNLIGALLFDSGETAEATRLKRTARRRYTRRKNRICYLQEIFSNEMAKVDDSFFHRLEESFLVEEDKKHERHPIFGNIVDEVAYHEKYPTIYHLRKKLVDSTDKADLRLIYLALAHMIKFRGHFLIEGDLNPDNSDVDKLFIQLVQTYNQLFEENPINASGVDAKAILSARLSKSRRLENLIAQLPGEKKNGLFGNLIALSLGLTPNFKSNFDLAEDAKLQLSKDTYDDDLDNLLAQIGDQYADLFLAAKNLSDAILLSDILRVNTEITKAPLSASMIKRYDEHHQDLTLLKALVRQQLPEKYKEIFFDQSKNGYAGYIDGGASQEEFYKFIKPILEKMDGTEELLVKLNREDLLRKQRTFDNGSIPHQIHLGELHAILRRQEDFYPFLKDNREKIEKILTFRIPYYVGPLARGNSRFAWMTRKSEETITPWNFEEVVDKGASAQSFIERMTNFDKNLPNEKVLPKHSLLYEYFTVYNELTKVKYVTEGMRKPAFLSGEQKKAIVDLLFKTNRKVTVKQLKEDYFKKIECFDSVEISGVEDRFNASLGTYHDLLKIIKDKDFLDNEENEDILEDIVLTLTLFEDREMIEERLKTYAHLFDDKVMKQLKRRRYTGWGRLSRKLINGIRDKQSGKTILDFLKSDGFANRNFMQLIHDDSLTFKEDIQKAQVSGQGDSLHEHIANLAGSPAIKKGILQTVKVVDELVKVMGRHKPENIVIEMARENQTTQKGQKNSRERMKRIEEGIKELGSQILKEHPVENTQLQNEKLYLYYLQNGRDMYVDQELDINRLSDYDVDHIVPQSFLKDDSIDNKVLTRSDKNRGKSDNVPSEEVVKKMKNYWRQLLNAKLITQRKFDNLTKAERGGLSELDKAGFIKRQLVETRQITKHVAQILDSRMNTKYDENDKLIREVKVITLKSKLVSDFRKDFQFYKVREINNYHHAHDAYLNAVVGTALIKKYPKLESEFVYGDYKVYDVRKMIAKSEQEGADKRTADGSEFESPKKKRKV

SEQ ID NO: 333 - protein, 1588 aa, synthetic construct
  REGION 1..1588: note = ABE8.8-m polypeptide sequence
  REGION 1..167: note = MISC_FEATURE - Adenosine deaminase sequence
  REGION 168..199: note = MISC_FEATURE - Linker sequence
  REGION 200..1566: note = MISC_FEATURE - Sequence derived from Cas9
  REGION 1567..1588: note = MISC_FEATURE - Bipartite nuclear localization sequence
MSEVEFSHEYWMRHALTLAKRARDEREVPVGAVLVLNNRVIGEGWNRAIGLHDPTAHAEIMALRQGGLVMQNYRLIDATLYVTFEPCVMCAGAMIHSRIGRVVFGVRNAKTGAAGSLMDVLHHPGMNHRVEITEGILADECAALLCRFFRMPRRVFNAQKKAQSSTDSGGSSGGSSGSETPGTSESATPESSGGSSGGSDKKYSIGLAIGTNSVGWAVITDEYKVPSKKFKVLGNTDRHSIKKNLIGALLFDSGETAEATRLKRTARRRYTRRKNRICYLQEIFSNEMAKVDDSFFHRLEESFLVEEDKKHERHPIFGNIVDEVAYHEKYPTIYHLRKKLVDSTDKADLRLIYLALAHMIKFRGHFLIEGDLNPDNSDVDKLFIQLVQTYNQLFEENPINASGVDAKAILSARLSKSRRLENLIAQLPGEKKNGLFGNLIALSLGLTPNFKSNFDLAEDAKLQLSKDTYDDDLDNLLAQIGDQYADLFLAAKNLSDAILLSDILRVNTEITKAPLSASMIKRYDEHHQDLTLLKALVRQQLPEKYKEIFFDQSKNGYAGYIDGGASQEEFYKFIKPILEKMDGTEELLVKLNREDLLRKQRTFDNGSIPHQIHLGELHAILRRQEDFYPFLKDNREKIEKILTFRIPYYVGPLARGNSRFAWMTRKSEETITPWNFEEVVDKGASAQSFIERMTNFDKNLPNEKVLPKHSLLYEYFTVYNELTKVKYVTEGMRKPAFLSGEQKKAIVDLLFKTNRKVTVKQLKEDYFKKIECFDSVEISGVEDRFNASLGTYHDLLKIIKDKDFLDNEENEDILEDIVLTLTLFEDREMIEERLKTYAHLFDDKVMKQLKRRRYTGWGRLSRKLINGIRDKQSGKTILDFLKSDGFANRNFMQLIHDDSLTFKEDIQKAQVSGQGDSLHEHIANLAGSPAIKKGILQTVKVVDELVKVMGRHKPENIVIEMARENQTTQKGQKNSRERMKRIEEGIKELGSQILKEHPVENTQLQNEKLYLYYLQNGRDMYVDQELDINRLSDYDVDHIVPQSFLKDDSIDNKVLTRSDKNRGKSDNVPSEEVVKKMKNYWRQLLNAKLITQRKFDNLTKAERGGLSELDKAGFIKRQLVETRQITKHVAQILDSRMNTKYDENDKLIREVKVITLKSKLVSDFRKDFQFYKVREINNYHHAHDAYLNAVVGTALIKKYPKLESEFVYGDYKVYDVRKMIAKSEQEIGKATAKYFFYSNIMNFFKTEITLANGEIRKRPLIETNGETGEIVWDKGRDFATVRKVLSMPQVNIVKKTEVQTGGFSKESILPKRNSDKLIARKKDWDPKKYGGFDSPTVAYSVLVVAKVEKGKSKKLKSVKELLGITIMERSSFEKNPIDFLEAKGYKEVKKDLIIKLPKYSLFELENGRKRMLASAGELQKGNELALPSKYVNFLYLASHYEKLKGSPEDNEQKQLFVEQHKHYLDEIIEQISEFSKRVILADANLDKVLSAYNKHRDKPIREQAENIIHLFTLTNLGAPAAFKYFDTTIDRKRYTSTKEVLDATLIHQSITGLYETRIDLSQLGGDEGADKRTADGSEFESPKKKRKV

SEQ ID NO: 334 - protein, 1786 aa, synthetic construct
  REGION 1..1786: note = ABE8.8-d polypeptide sequence
  REGION 1..167: note = MISC_FEATURE - Adenosine deaminase sequence
  REGION 168..199: note = MISC_FEATURE - Linker sequence
  REGION 200..365: note = MISC_FEATURE - Adenosine deaminase sequence
  REGION 366..397: note = MISC_FEATURE - Linker sequence
  REGION 398..1764: note = MISC_FEATURE - Sequence derived from Cas9
  REGION 1765..1786: note = MISC_FEATURE - Bipartite nuclear localization sequence
MSEVEFSHEYWMRHALTLAKRAWDEREVPVGAVLVHNNRVIGEGWNRPIGRHDPTAHAEIMALRQGGLVMQNYRLIDATLYVTLEPCVMCAGAMIHSRIGRVVFGARDAKTGAAGSLMDVLHHPGMNHRVEITEGILADECAALLSDFFRMRRQEIKAQKKAQSSTDSGGSSGGSSGSETPGTSESATPESSGGSSGGSSEVEFSHEYWMRHALTLAKRARDEREVPVGAVLVLNNRVIGEGWNRAIGLHDPTAHAEIMALRQGGLVMQNYRLIDATLYVTFEPCVMCAGAMIHSRIGRVVFGVRNAKTGAAGSLMDVLHHPGMNHRVEITEGILADECAALLCRFFRMPRRVFNAQKKAQSSTDSGGSSGGSSGSETPGTSESATPESSGGSSGGSDKKYSIGLAIGTNSVGWAVITDEYKVPSKKFKVLGNTDRHSIKKNLIGALLFDSGETAEATRLKRTARRRYTRRKNRICYLQEIFSNEMAKVDDSFFHRLEESFLVEEDKKHERHPIFGNIVDEVAYHEKYPTIYHLRKKLVDSTDKADLRLIYLALAHMIKFRGHFLIEGDLNPDNSDVDKLFIQLVQTYNQLFEENPINASGVDAKAILSARLSKSRRLENLIAQLPGEKKNGLFGNLIALSLGLTPNFKSNFDLAEDAKLQLSKDTYDDDLDNLLAQIGDQYADLFLAAKNLSDAILLSDILRVNTEITKAPLSASMIKRYDEHHQDLTLLKALVRQQLPEKYKEIFFDQSKNGYAGYIDGGASQEEFYKFIKPILEKMDGTEELLVKLNREDLLRKQRTFDNGSIPHQIHLGELHAILRRQEDFYPFLKDNREKIEKILTFRIPYYVGPLARGNSRFAWMTRKSEETITPWNFEEVVDKGASAQSFIERMTNFDKNLPNEKVLPKHSLLYEYFTVYNELTKVKYVTEGMRKPAFLSGEQKKAIVDLLFKTNRKVTVKQLKEDYFKKIECFDSVEISGVEDRFNASLGTYHDLLKIIKDKDFLDNEENEDILEDIVLTLTLFEDREMIEERLKTYAHLFDDKVMKQLKRRRYTGWGRLSRKLINGIRDKQSGKTILDFLKSDGFANRNFMQLIHDDSLTFKEDIQKAQVSGQGDSLHEHIANLAGSPAIKKGILQTVKVVDELVKVMGRHKPENIVIEMARENQTTQKGQKNSRERMKRIEEGIKELGSQILKEHPVENTQLQNEKLYLYYLQNGRDMYVDQELDINRLSDYDVDHIVPQSFLKDDSIDNKVLTRSDKNRGKSDNVPSEEVVKKMKNYWRQLLNAKLITQRKFDNLTKAERGGLSELDKAGFIKRQLVETRQITKHVAQILDSRMNTKYDENDKLIREVKVITLKSKLVSDFRKDFQFYKVREINNYHHAHDAYLNAVVGTALIKKYPKLESEFVYGDYKVYDVRKMIAKSEQEIGKATAKYFFYSNIMNFFKTEITLANGEIRKRPLIETNGETGEIVWDKGRDFATVRKVLSMPQVNIVKKTEVQTGGFSKESILPKRNSDKLIARKKDWDPKKYGGFDSPTVAYSVLVVAKVEKGKSKKLKSVKELLGITIMERSSFEKNPIDFLEAKGYKEVKKDLIIKLPKYSLFELENGRKRMLASAGELQKGNELALPSKYVNFLYLASHYEKLKGSPEDNEQKQLFVEQHKHYLDEIIEQISEFSKRVILADANLDKVLSAYNKHRDKPIREQAENIIHLFTLTNLGAPAAFKYFDTTIDRKRYTSTKEVLDATLIHQSITGLYETRIDLSQLGGDEGADKRTADGSEFESPKKKRKV

SEQ ID NO: 335 - protein, 1588 aa, synthetic construct
  REGION 1..1588: note = ABE8.13-m polypeptide sequence
  REGION 1..167: note = MISC_FEATURE - Adenosine deaminase sequence
  REGION 168..199: note = MISC_FEATURE - Linker sequence
  REGION 200..1566: note = MISC_FEATURE - Sequence derived from Cas9
  REGION 1567..1588: note = MISC_FEATURE - Bipartite nuclear localization sequence
MSEVEFSHEYWMRHALTLAKRARDEREVPVGAVLVLNNRVIGEGWNRAIGLHDPTAHAEIMALRQGGLVMQNYRLYDATLYVTFEPCVMCAGAMIHSRIGRVVFGVRNAKTGAAGSLMDVLHHPGMNHRVEITEGILADECAALLCRFFRMPRRVFNAQKKAQSSTDSGGSSGGSSGSETPGTSESATPESSGGSSGGSDKKYSIGLAIGTNSVGWAVITDEYKVPSKKFKVLGNTDRHSIKKNLIGALLFDSGETAEATRLKRTARRRYTRRKNRICYLQEIFSNEMAKVDDSFFHRLEESFLVEEDKKHERHPIFGNIVDEVAYHEKYPTIYHLRKKLVDSTDKADLRLIYLALAHMIKFRGHFLIEGDLNPDNSDVDKLFIQLVQTYNQLFEENPINASGVDAKAILSARLSKSRRLENLIAQLPGEKKNGLFGNLIALSLGLTPNFKSNFDLAEDAKLQLSKDTYDDDLDNLLAQIGDQYADLFLAAKNLSDAILLSDILRVNTEITKAPLSASMIKRYDEHHQDLTLLKALVRQQLPEKYKEIFFDQSKNGYAGYIDGGASQEEFYKFIKPILEKMDGTEELLVKLNREDLLRKQRTFDNGSIPHQIHLGELHAILRRQEDFYPFLKDNREKIEKILTFRIPYYVGPLARGNSRFAWMTRKSEETITPWNFEEVVDKGASAQSFIERMTNFDKNLPNEKVLPKHSLLYEYFTVYNELTKVKYVTEGMRKPAFLSGEQKKAIVDLLFKTNRKVTVKQLKEDYFKKIECFDSVEISGVEDRFNASLGTYHDLLKIIKDKDFLDNEENEDILEDIVLTLTLFEDREMIEERLKTYAHLFDDKVMKQLKRRRYTGWGRLSRKLINGIRDKQSGKTILDFLKSDGFANRNFMQLIHDDSLTFKEDIQKAQVSGQGDSLHEHIANLAGSPAIKKGILQTVKVVDELVKVMGRHKPENIVIEMARENQTTQKGQKNSRERMKRIEEGIKELGSQILKEHPVENTQLQNEKLYLYYLQNGRDMYVDQELDINRLSDYDVDHIVPQSFLKDDSIDNKVLTRSDKNRGKSDNVPSEEVVKKMKNYWRQLLNAKLITQRKFDNLTKAERGGLSELDKAGFIKRQLVETRQITKHVAQILDSRMNTKYDENDKLIREVKVITLKSKLVSDFRKDFQFYKVREINNYHHAHDAYLNAVVGTALIKKYPKLESEFVYGDYKVYDVRKMIAKSEQEIGKATAKYFFYSNIMNFFKTEITLANGEIRKRPLIETNGETGEIVWDKGRDFATVRKVLSMPQVNIVKKTEVQTGGFSKESILPKRNSDKLIARKKDWDPKKYGGFDSPTVAYSVLVVAKVEKGKSKKLKSVKELLGITIMERSSFEKNPIDFLEAKGYKEVKKDLIIKLPKYSLFELENGRKRMLASAGELQKGNELALPSKYVNFLYLASHYEKLKGSPEDNEQKQLFVEQHKHYLDEIIEQISEFSKRVILADANLDKVLSAYNKHRDKPIREQAENIIHLFTLTNLGAPAAFKYFDTTIDRKRYTSTKEVLDATLIHQSITGLYETRIDLSQLGGDEGADKRTADGSEFESPKKKRKV

SEQ ID NO: 336 - protein, 1786 aa, synthetic construct
  REGION 1..1786: note = ABE8.13-d polypeptide sequence
  REGION 1..167: note = MISC_FEATURE - Adenosine deaminase sequence
  REGION 168..199: note = MISC_FEATURE - Linker sequence
  REGION 200..365: note = MISC_FEATURE - Adenosine deaminase sequence
  REGION 366..397: note = MISC_FEATURE - Linker sequence
  REGION 398..1764: note = MISC_FEATURE - Sequence derived from Cas9
  REGION 1765..1786: note = MISC_FEATURE - Bipartite nuclear localization sequence
MSEVEFSHEYWMRHALTLAKRAWDEREVPVGAVLVHNNRVIGEGWNRPIGRHDPTAHAEIMALRQGGLVMQNYRLIDATLYVTLEPCVMCAGAMIHSRIGRVVFGARDAKTGAAGSLMDVLHHPGMNHRVEITEGILADECAALLSDFFRMRRQEIKAQKKAQSSTDSGGSSGGSSGSETPGTSESATPESSGGSSGGSSEVEFSHEYWMRHALTLAKRARDEREVPVGAVLVLNNRVIGEGWNRAIGLHDPTAHAEIMALRQGGLVMQNYRLYDATLYVTFEPCVMCAGAMIHSRIGRVVFGVRNAKTGAAGSLMDVLHHPGMNHRVEITEGILADECAALLCRFFRMPRRVFNAQKKAQSSTDSGGSSGGSSGSETPGTSESATPESSGGSSGGSDKKYSIGLAIGTNSVGWAVITDEYKVPSKKFKVLGNTDRHSIKKNLIGALLFDSGETAEATRLKRTARRRYTRRKNRICYLQEIFSNEMAKVDDSFFHRLEESFLVEEDKKHERHPIFGNIVDEVAYHEKYPTIYHLRKKLVDSTDKADLRLIYLALAHMIKFRGHFLIEGDLNPDNSDVDKLFIQLVQTYNQLFEENPINASGVDAKAILSARLSKSRRLENLIAQLPGEKKNGLFGNLIALSLGLTPNFKSNFDLAEDAKLQLSKDTYDDDLDNLLAQIGDQYADLFLAAKNLSDAILLSDILRVNTEITKAPLSASMIKRYDEHHQDLTLLKALVRQQLPEKYKEIFFDQSKNGYAGYIDGGASQEEFYKFIKPILEKMDGTEELLVKLNREDLLRKQRTFDNGSIPHQIHLGELHAILRRQEDFYPFLKDNREKIEKILTFRIPYYVGPLARGNSRFAWMTRKSEETITPWNFEEVVDKGASAQSFIERMTNFDKNLPNEKVLPKHSLLYEYFTVYNELTKVKYVTEGMRKPAFLSGEQKKAIVDLLFKTNRKVTVKQLKEDYFKKIECFDSVEISGVEDRFNASLGTYHDLLKIIKDKDFLDNEENEDILEDIVLTLTLFEDREMIEERLKTYAHLFDDKVMKQLKRRRYTGWGRLSRKLINGIRDKQSGKTILDFLKSDGFANRNFMQLIHDDSLTFKEDIQKAQVSGQGDSLHEHIANLAGSPAIKKGILQTVKVVDELVKVMGRHKPENIVIEMARENQTTQKGQKNSRERMKRIEEGIKELGSQILKEHPVENTQLQNEKLYLYYLQNGRDMYVDQELDINRLSDYDVDHIVPQSFLKDDSIDNKVLTRSDKNRGKSDNVPSEEVVKKMKNYWRQLLNAKLITQRKFDNLTKAERGGLSELDKAGFIKRQLVETRQITKHVAQILDSRMNTKYDENDKLIREVKVITLKSKLVSDFRKDFQFYKVREINNYHHAHDAYLNAVVGTALIKKYPKLESEFVYGDYKVYDVRKMIAKSEQEIGKATAKYFFYSNIMNFFKTEITLANGEIRKRPLIETNGETGEIVWDKGRDFATVRKVLSMPQVNIVKKTEVQTGGFSKESILPKRNSDKLIARKKDWDPKKYGGFDSPTVAYSVLVVAKVEKGKSKKLKSVKELLGITIMERSSFEKNPIDFLEAKGYKEVKKDLIIKLPKYSLFELENGRKRMLASAGELQKGNELALPSKYVNFLYLASHYEKLKGSPEDNEQKQLFVEQHKHYLDEIIEQISEFSKRVILADANLDKVLSAYNKHRDKPIREQAENIIHLFTLTNLGAPAAFKYFDTTIDRKRYTSTKEVLDATLIHQSITGLYETRIDLSQLGGDEGADKRTADGSEFESPKKKRKV

SEQ ID NO: 337 - protein, 1588 aa, synthetic construct
  REGION 1..1588: note = ABE8.17-m polypeptide sequence
  REGION 1..167: note = MISC_FEATURE - Adenosine deaminase sequence
  REGION 168..199: note = MISC_FEATURE - Linker sequence
  REGION 200..1566: note = MISC_FEATURE - Sequence derived from Cas9
  REGION 1567..1588: note = MISC_FEATURE - Bipartite nuclear localization sequence
MSEVEFSHEYWMRHALTLAKRARDEREVPVGAVLVLNNRVIGEGWNRAIGLHDPTAHAEIMALRQGGLVMQNYRLIDATLYSTFEPCVMCAGAMIHSRIGRVVFGVRNAKTGAAGSLMDVLHYPGMNHRVEITEGILADECAALLCYFFRMPRRVFNAQKKAQSSTDSGGSSGGSSGSETPGTSESATPESSGGSSGGSDKKYSIGLAIGTNSVGWAVITDEYKVPSKKFKVLGNTDRHSIKKNLIGALLFDSGETAEATRLKRTARRRYTRRKNRICYLQEIFSNEMAKVDDSFFHRLEESFLVEEDKKHERHPIFGNIVDEVAYHEKYPTIYHLRKKLVDSTDKADLRLIYLALAHMIKFRGHFLIEGDLNPDNSDVDKLFIQLVQTYNQLFEENPINASGVDAKAILSARLSKSRRLENLIAQLPGEKKNGLFGNLIALSLGLTPNFKSNFDLAEDAKLQLSKDTYDDDLDNLLAQIGDQYADLFLAAKNLSDAILLSDILRVNTEITKAPLSASMIKRYDEHHQDLTLLKALVRQQLPEKYKEIFFDQSKNGYAGYIDGGASQEEFYKFIKPILEKMDGTEELLVKLNREDLLRKQRTFDNGSIPHQIHLGELHAILRRQEDFYPFLKDNREKIEKILTFRIPYYVGPLARGNSRFAWMTRKSEETITPWNFEEVVDKGASAQSFIERMTNFDKNLPNEKVLPKHSLLYEYFTVYNELTKVKYVTEGMRKPAFLSGEQKKAIVDLLFKTNRKVTVKQLKEDYFKKIECFDSVEISGVEDRFNASLGTYHDLLKIIKDKDFLDNEENEDILEDIVLTLTLFEDREMIEERLKTYAHLFDDKVMKQLKRRRYTGWGRLSRKLINGIRDKQSGKTILDFLKSDGFANRNFMQLIHDDSLTFKEDIQKAQVSGQGDSLHEHIANLAGSPAIKKGILQTVKVVDELVKVMGRHKPENIVIEMARENQTTQKGQKNSRERMKRIEEGIKELGSQILKEHPVENTQLQNEKLYLYYLQNGRDMYVDQELDINRLSDYDVDHIVPQSFLKDDSIDNKVLTRSDKNRGKSDNVPSEEVVKKMKNYWRQLLNAKLITQRKFDNLTKAERGGLSELDKAGFIKRQLVETRQITKHVAQILDSRMNTKYDENDKLIREVKVITLKSKLVSDFRKDFQFYKVREINNYHHAHDAYLNAVVGTALIKKYPKLESEFVYGDYKVYDVRKMIAKSEQEIGKATAKYFFYSNIMNFFKTEITLANGEIRKRPLIETNGETGEIVWDKGRDFATVRKVLSMPQVNIVKKTEVQTGGFSKESILPKRNSDKLIARKKDWDPKKYGGFDSPTVAYSVLVVAKVEKGKSKKLKSVKELLGITIMERSSFEKNPIDFLEAKGYKEVKKDLIIKLPKYSLFELENGRKRMLASAGELQKGNELALPSKYVNFLYLASHYEKLKGSPEDNEQKQLFVEQHKHYLDEIIEQISEFSKRVILADANLDKVLSAYNKHRDKPIREQAENIIHLFTLTNLGAPAAFKYFDTTIDRKRYTSTKEVLDATLIHQSITGLYETRIDLSQLGGDEGADKRTADGSEFESPKKKRKV

SEQ ID NO: 338 - protein, 1786 aa, synthetic construct
  REGION 1..1786: note = ABE8.17-d polypeptide sequence
  REGION 1..167: note = MISC_FEATURE - Adenosine deaminase sequence
  REGION 168..199: note = MISC_FEATURE - Linker sequence
  REGION 200..365: note = MISC_FEATURE - Adenosine deaminase sequence
  REGION 366..397: note = MISC_FEATURE - Linker sequence
  REGION 398..1764: note = MISC_FEATURE - Sequence derived from Cas9
  REGION 1765..1786: note = MISC_FEATURE - Bipartite nuclear localization sequence
MSEVEFSHEYWMRHALTLAKRAWDEREVPVGAVLVHNNRVIGEGWNRPIGRHDPTAHAEIMALRQGGLVMQNYRLIDATLYVTLEPCVMCAGAMIHSRIGRVVFGARDAKTGAAGSLMDVLHHPGMNHRVEITEGILADECAALLSDFFRMRRQEIKAQKKAQSSTDSGGSSGGSSGSETPGTSESATPESSGGSSGGSSEVEFSHEYWMRHALTLAKRARDEREVPVGAVLVLNNRVIGEGWNRAIGLHDPTAHAEIMALRQGGLVMQNYRLIDATLYSTFEPCVMCAGAMIHSRIGRVVFGVRNAKTGAAGSLMDVLHYPGMNHRVEITEGILADECAALLCYFFRMPRRVFNAQKKAQSSTDSGGSSGGSSGSETPGTSESATPESSGGSSGGSDKKYSIGLAIGTNSVGWAVITDEYKVPSKKFKVLGNTDRHSIKKNLIGALLFDSGETAEATRLKRTARRRYTRRKNRICYLQEIFSNEMAKVDDSFFHRLEESFLVEEDKKHERHPIFGNIVDEVAYHEKYPTIYHLRKKLVDSTDKADLRLIYLALAHMIKFRGHFLIEGDLNPDNSDVDKLFIQLVQTYNQLFEENPINASGVDAKAILSARLSKSRRLENLIAQLPGEKKNGLFGNLIALSLGLTPNFKSNFDLAEDAKLQLSKDTYDDDLDNLLAQIGDQYADLFLAAKNLSDAILLSDILRVNTEITKAPLSASMIKRYDEHHQDLTLLKALVRQQLPEKYKEIFFDQSKNGYAGYIDGGASQEEFYKFIKPILEKMDGTEELLVKLNREDLLRKQRTFDNGSIPHQIHLGELHAILRRQEDFYPFLKDNREKIEKILTFRIPYYVGPLARGNSRFAWMTRKSEETITPWNFEEVVDKGASAQSFIERMTNFDKNLPNEKVLPKHSLLYEYFTVYNELTKVKYVTEGMRKPAFLSGEQKKAIVDLLFKTNRKVTVKQLKEDYFKKIECFDSVEISGVEDRFNASLGTYHDLLKIIKDKDFLDNEENEDILEDIVLTLTLFEDREMIEERLKTYAHLFDDKVMKQLKRRRYTGWGRLSRKLINGIRDKQSGKTILDFLKSDGFANRNFMQLIHDDSLTFKEDIQKAQVSGQGDSLHEHIANLAGSPAIKKGILQTVKVVDELVKVMGRHKPENIVIEMARENQTTQKGQKNSRERMKRIEEGIKELGSQILKEHPVENTQLQNEKLYLYYLQNGRDMYVDQELDINRLSDYDVDHIVPQSFLKDDSIDNKVLTRSDKNRGKSDNVPSEEVVKKMKNYWRQLLNAKLITQRKFDNLTKAERGGLSELDKAGFIKRQLVETRQITKHVAQILDSRMNTKYDENDKLIREVKVITLKSKLVSDFRKDFQFYKVREINNYHHAHDAYLNAVVGTALIKKYPKLESEFVYGDYKVYDVRKMIAKSEQEIGKATAKYFFYSNIMNFFKTEITLANGEIRKRPLIETNGETGEIVWDKGRDFATVRKVLSMPQVNIVKKTEVQTGGFSKESILPKRNSDKLIARKKDWDPKKYGGFDSPTVAYSVLVVAKVEKGKSKKLKSVKELLGITIMERSSFEKNPIDFLEAKGYKEVKKDLIIKLPKYSLFELENGRKRMLASAGELQKGNELALPSKYVNFLYLASHYEKLKGSPEDNEQKQLFVEQHKHYLDEIIEQISEFSKRVILADANLDKVLSAYNKHRDKPIREQAENIIHLFTLTNLGAPAAFKYFDTTIDRKRYTSTKEVLDATLIHQSITGLYETRIDLSQLGGDEGADKRTADGSEFESPKKKRKV

SEQ ID NO: 339 - protein, 1588 aa, synthetic construct
  REGION 1..1588: note = ABE8.20-m polypeptide sequence
  REGION 1..167: note = MISC_FEATURE - Adenosine deaminase sequence
  REGION 168..199: note = MISC_FEATURE - Linker sequence
  REGION 200..1566: note = MISC_FEATURE - Sequence derived from Cas9
  REGION 1567..1588: note = MISC_FEATURE - Bipartite nuclear localization sequence
MSEVEFSHEYWMRHALTLAKRARDEREVPVGAVLVLNNRVIGEGWNRAIGLHDPTAHAEIMALRQGGLVMQNYRLYDATLYSTFEPCVMCAGAMIHSRIGRVVFGVRNAKTGAAGSLMDVLHHPGMNHRVEITEGILADECAALLCRFFRMPRRVFNAQKKAQSSTDSGGSSGGSSGSETPGTSESATPESSGGSSGGSDKKYSIGLAIGTNSVGWAVITDEYKVPSKKFKVLGNTDRHSIKKNLIGALLFDSGETAEATRLKRTARRRYTRRKNRICYLQEIFSNEMAKVDDSFFHRLEESFLVEEDKKHERHPIFGNIVDEVAYHEKYPTIYHLRKKLVDSTDKADLRLIYLALAHMIKFRGHFLIEGDLNPDNSDVDKLFIQLVQTYNQLFEENPINASGVDAKAILSARLSKSRRLENLIAQLPGEKKNGLFGNLIALSLGLTPNFKSNFDLAEDAKLQLSKDTYDDDLDNLLAQIGDQYADLFLAAKNLSDAILLSDILRVNTEITKAPLSASMIKRYDEHHQDLTLLKALVRQQLPEKYKEIFFDQSKNGYAGYIDGGASQEEFYKFIKPILEKMDGTEELLVKLNREDLLRKQRTFDNGSIPHQIHLGELHAILRRQEDFYPFLKDNREKIEKILTFRIPYYVGPLARGNSRFAWMTRKSEETITPWNFEEVVDKGASAQSFIERMTNFDKNLPNEKVLPKHSLLYEYFTVYNELTKVKYVTEGMRKPAFLSGEQKKAIVDLLFKTNRKVTVKQLKEDYFKKIECFDSVEISGVEDRFNASLGTYHDLLKIIKDKDFLDNEENEDILEDIVLTLTLFEDREMIEERLKTYAHLFDDKVMKQLKRRRYTGWGRLSRKLINGIRDKQSGKTILDFLKSDGFANRNFMQLIHDDSLTFKEDIQKAQVSGQGDSLHEHIANLAGSPAIKKGILQTVKVVDELVKVMGRHKPENIVIEMARENQTTQKGQKNSRERMKRIEEGIKELGSQILKEHPVENTQLQNEKLYLYYLQNGRDMYVDQELDINRLSDYDVDHIVPQSFLKDDSIDNKVLTRSDKNRGKSDNVPSEEVVKKMKNYWRQLLNAKLITQRKFDNLTKAERGGLSELDKAGFIKRQLVETRQITKHVAQILDSRMNTKYDENDKLIREVKVITLKSKLVSDFRKDFQFYKVREINNYHHAHDAYLNAVVGTALIKKYPKLESEFVYGDYKVYDVRKMIAKSEQEIGKATAKYFFYSNIMNFFKTEITLANGEIRKRPLIETNGETGEIVWDKGRDFATVRKVLSMPQVNIVKKTEVQTGGFSKESILPKRNSDKLIARKKDWDPKKYGGFDSPTVAYSVLVVAKVEKGKSKKLKSVKELLGITIMERSSFEKNPIDFLEAKGYKEVKKDLIIKLPKYSLFELENGRKRMLASAGELQKGNELALPSKYVNFLYLASHYEKLKGSPEDNEQKQLFVEQHKHYLDEIIEQISEFSKRVILADANLDKVLSAYNKHRDKPIREQAENIIHLFTLTNLGAPAAFKYFDTTIDRKRYTSTKEVLDATLIHQSITGLYETRIDLSQLGGDEGADKRTADGSEFESPKKKRKV

SEQ ID NO: 340 - protein, 1786 aa, synthetic construct
  REGION 1..1786: note = ABE8.20-d polypeptide sequence
  REGION 1..167: note = MISC_FEATURE - Adenosine deaminase sequence
  REGION 168..199: note = MISC_FEATURE - Linker sequence
  REGION 200..365: note = MISC_FEATURE - Adenosine deaminase sequence
  REGION 366..397: note = MISC_FEATURE - Linker sequence
  REGION 398..1764: note = MISC_FEATURE - Sequence derived from Cas9
  REGION 1765..1786: note = MISC_FEATURE - Bipartite nuclear localization sequence
MSEVEFSHEYWMRHALTLAKRAWDEREVPVGAVLVHNNRVIGEGWNRPIGRHDPTAHAEIMALRQGGLVMQNYRLIDATLYVTLEPCVMCAGAMIHSRIGRVVFGARDAKTGAAGSLMDVLHHPGMNHRVEITEGILADECAALLSDFFRMRRQEIKAQKKAQSSTDSGGSSGGSSGSETPGTSESATPESSGGSSGGSSEVEFSHEYWMRHALTLAKRARDEREVPVGAVLVLNNRVIGEGWNRAIGLHDPTAHAEIMALRQGGLVMQNYRLYDATLYSTFEPCVMCAGAMIHSRIGRVVFGVRNAKTGAAGSLMDVLHHPGMNHRVEITEGILADECAALLCRFFRMPRRVFNAQKKAQSSTDSGGSSGGSSGSETPGTSESATPESSGGSSGGSDKKYSIGLAIGTNSVGWAVITDEYKVPSKKFKVLGNTDRHSIKKNLIGALLFDSGETAEATRLKRTARRRYTRRKNRICYLQEIFSNEMAKVDDSFFHRLEESFLVEEDKKHERHPIFGNIVDEVAYHEKYPTIYHLRKKLVDSTDKADLRLIYLALAHMIKFRGHFLIEGDLNPDNSDVDKLFIQLVQTYNQLFEENPINASGVDAKAILSARLSKSRRLENLIAQLPGEKKNGLFGNLIALSLGLTPNFKSNFDLAEDAKLQLSKDTYDDDLDNLLAQIGDQYADLFLAAKNLSDAILLSDILRVNTEITKAPLSASMIKRYDEHHQDLTLLKALVRQQLPEKYKEIFFDQSKNGYAGYIDGGASQEEFYKFIKPILEKMDGTEELLVKLNREDLLRKQRTFDNGSIPHQIHLGELHAILRRQEDFYPFLKDNREKIEKILTFRIPYYVGPLARGNSRFAWMTRKSEETITPWNFEEVVDKGASAQSFIERMTNFDKNLPNEKVLPKHSLLYEYFTVYNELTKVKYVTEGMRKPAFLSGEQKKAIVDLLFKTNRKVTVKQLKEDYFKKIECFDSVEISGVEDRFNASLGTYHDLLKIIKDKDFLDNEENEDILEDIVLTLTLFEDREMIEERLKTYAHLFDDKVMKQLKRRRYTGWGRLSRKLINGIRDKQSGKTILDFLKSDGFANRNFMQLIHDDSLTFKEDIQKAQVSGQGDSLHEHIANLAGSPAIKKGILQTVKVVDELVKVMGRHKPENIVIEMARENQTTQKGQKNSRERMKRIEEGIKELGSQILKEHPVENTQLQNEKLYLYYLQNGRDMYVDQELDINRLSDYDVDHIVPQSFLKDDSIDNKVLTRSDKNRGKSDNVPSEEVVKKMKNYWRQLLNAKLITQRKFDNLTKAERGGLSELDKAGFIKRQLVETRQITKHVAQILDSRMNTKYDENDKLIREVKVITLKSKLVSDFRKDFQFYKVREINNYHHAHDAYLNAVVGTALIKKYPKLESEFVYGDYKVYDVRKMIAKSEQEIGKATAKYFFYSNIMNFFKTEITLANGEIRKRPLIETNGETGEIVWDKGRDFATVRKVLSMPQVNIVKKTEVQTGGFSKESILPKRNSDKLIARKKDWDPKKYGGFDSPTVAYSVLVVAKVEKGKSKKLKSVKELLGITIMERSSFEKNPIDFLEAKGYKEVKKDLIIKLPKYSLFELENGRKRMLASAGELQKGNELALPSKYVNFLYLASHYEKLKGSPEDNEQKQLFVEQHKHYLDEIIEQISEFSKRVILADANLDKVLSAYNKHRDKPIREQAENIIHLFTLTNLGAPAAFKYFDTTIDRKRYTSTKEVLDATLIHQSITGLYETRIDLSQLGGDEGADKRTADGSEFESPKKKRKV

SEQ ID NO: 341 - protein, 1588 aa, synthetic construct
  REGION 1..1588: note = 01. monoABE8.1_bpNLS + Y147T polypeptide sequence
MSEVEFSHEYWMRHALTLAKRARDEREVPVGAVLVLNNRVIGEGWNRAIGLHDPTAHAEIMALRQGGLVMQNYRLIDATLYVTFEPCVMCAGAMIHSRIGRVVFGVRNAKTGAAGSLMDVLHYPGMNHRVEITEGILADECAALLCTFFRMPRQVFNAQKKAQSSTDSGGSSGGSSGSETPGTSESATPESSGGSSGGSDKKYSIGLAIGTNSVGWAVITDEYKVPSKKFKVLGNTDRHSIKKNLIGALLFDSGETAEATRLKRTARRRYTRRKNRICYLQEIFSNEMAKVDDSFFHRLEESFLVEEDKKHERHPIFGNIVDEVAYHEKYPTIYHLRKKLVDSTDKADLRLIYLALAHMIKFRGHFLIEGDLNPDNSDVDKLFIQLVQTYNQLFEENPINASGVDAKAILSARLSKSRRLENLIAQLPGEKKNGLFGNLIALSLGLTPNFKSNFDLAEDAKLQLSKDTYDDDLDNLLAQIGDQYADLFLAAKNLSDAILLSDILRVNTEITKAPLSASMIKRYDEHHQDLTLLKALVRQQLPEKYKEIFFDQSKNGYAGYIDGGASQEEFYKFIKPILEKMDGTEELLVKLNREDLLRKQRTFDNGSIPHQIHLGELHAILRRQEDFYPFLKDNREKIEKILTFRIPYYVGPLARGNSRFAWMTRKSEETITPWNFEEVVDKGASAQSFIERMTNFDKNLPNEKVLPKHSLLYEYFTVYNELTKVKYVTEGMRKPAFLSGEQKKAIVDLLFKTNRKVTVKQLKEDYFKKIECFDSVEISGVEDRFNASLGTYHDLLKIIKDKDFLDNEENEDILEDIVLTLTLFEDREMIEERLKTYAHLFDDKVMKQLKRRRYTGWGRLSRKLINGIRDKQSGKTILDFLKSDGFANRNFMQLIHDDSLTFKEDIQKAQVSGQGDSLHEHIANLAGSPAIKKGILQTVKVVDELVKVMGRHKPENIVIEMARENQTTQKGQKNSRERMKRIEEGIKELGSQILKEHPVENTQLQNEKLYLYYLQNGRDMYVDQELDINRLSDYDVDHIVPQSFLKDDSIDNKVLTRSDKNRGKSDNVPSEEVVKKMKNYWRQLLNAKLITQRKFDNLTKAERGGLSELDKAGFIKRQLVETRQITKHVAQILDSRMNTKYDENDKLIREVKVITLKSKLVSDFRKDFQFYKVREINNYHHAHDAYLNAVVGTALIKKYPKLESEFVYGDYKVYDVRKMIAKSEQEIGKATAKYFFYSNIMNFFKTEITLANGEIRKRPLIETNGETGEIVWDKGRDFATVRKVLSMPQVNIVKKTEVQTGGFSKESILPKRNSDKLIARKKDWDPKKYGGFVSPTVAYSVLVVAKVEKGKSKKLKSVKELLGITIMERSSFEKNPIDFLEAKGYKEVKKDLIIKLPKYSLFELENGRKRMLASARELQKGNELALPSKYVNFLYLASHYEKLKGSPEDNEQKQLFVEQHKHYLDEIIEQISEFSKRVILADANLDKVLSAYNKHRDKPIREQAENIIHLFTLTNLGAPAAFKYFDTTIDRKQYRSTKEVLDATLIHQSITGLYETRIDLSQLGGDEGADKRTADGSEFESPKKKRKV

SEQ ID NO: 342 - protein, 1588 aa, synthetic construct
  REGION 1..1588: note = 02. monoABE8.1_bpNLS + Y147R polypeptide sequence
MSEVEFSHEYWMRHALTLAKRARDEREVPVGAVLVLNNRVIGEGWNRAIGLHDPTAHAEIMALRQGGLVMQNYRLIDATLYVTFEPCVMCAGAMIHSRIGRVVFGVRNAKTGAAGSLMDVLHYPGMNHRVEITEGILADECAALLCRFFRMPRQVFNAQKKAQSSTDSGGSSGGSSGSETPGTSESATPESSGGSSGGSDKKYSIGLAIGTNSVGWAVITDEYKVPSKKFKVLGNTDRHSIKKNLIGALLFDSGETAEATRLKRTARRRYTRRKNRICYLQEIFSNEMAKVDDSFFHRLEESFLVEEDKKHERHPIFGNIVDEVAYHEKYPTIYHLRKKLVDSTDKADLRLIYLALAHMIKFRGHFLIEGDLNPDNSDVDKLFIQLVQTYNQLFEENPINASGVDAKAILSARLSKSRRLENLIAQLPGEKKNGLFGNLIALSLGLTPNFKSNFDLAEDAKLQLSKDTYDDDLDNLLAQIGDQYADLFLAAKNLSDAILLSDILRVNTEITKAPLSASMIKRYDEHHQDLTLLKALVRQQLPEKYKEIFFDQSKNGYAGYIDGGASQEEFYKFIKPILEKMDGTEELLVKLNREDLLRKQRTFDNGSIPHQIHLGELHAILRRQEDFYPFLKDNREKIEKILTFRIPYYVGPLARGNSRFAWMTRKSEETITPWNFEEVVDKGASAQSFIERMTNFDKNLPNEKVLPKHSLLYEYFTVYNELTKVKYVTEGMRKPAFLSGEQKKAIVDLLFKTNRKVTVKQLKEDYFKKIECFDSVEISGVEDRFNASLGTYHDLLKIIKDKDFLDNEENEDILEDIVLTLTLFEDREMIEERLKTYAHLFDDKVMKQLKRRRYTGWGRLSRKLINGIRDKQSGKTILDFLKSDGFANRNFMQLIHDDSLTFKEDIQKAQVSGQGDSLHEHIANLAGSPAIKKGILQTVKVVDELVKVMGRHKPENIVIEMARENQTTQKGQKNSRERMKRIEEGIKELGSQILKEHPVENTQLQNEKLYLYYLQNGRDMYVDQELDINRLSDYDVDHIVPQSFLKDDSIDNKVLTRSDKNRGKSDNVPSEEVVKKMKNYWRQLLNAKLITQRKFDNLTKAERGGLSELDKAGFIKRQLVETRQITKHVAQILDSRMNTKYDENDKLIREVKVITLKSKLVSDFRKDFQFYKVREINNYHHAHDAYLNAVVGTALIKKYPKLESEFVYGDYKVYDVRKMIAKSEQEIGKATAKYFFYSNIMNFFKTEITLANGEIRKRPLIETNGETGEIVWDKGRDFATVRKVLSMPQVNIVKKTEVQTGGFSKESILPKRNSDKLIARKKDWDPKKYGGFVSPTVAYSVLVVAKVEKGKSKKLKSVKELLGITIMERSSFEKNPIDFLEAKGYKEVKKDLIIKLPKYSLFELENGRKRMLASARELQKGNELALPSKYVNFLYLASHYEKLKGSPEDNEQKQLFVEQHKHYLDEIIEQISEFSKRVILADANLDKVLSAYNKHRDKPIREQAENIIHLFTLTNLGAPAAFKYFDTTIDRKQYRSTKEVLDATLIHQSITGLYETRIDLSQLGGDEGADKRTADGSEFESPKKKRKV

SEQ ID NO: 343 - protein, 1588 aa, synthetic construct
  REGION 1..1588: note = 03. monoABE8.1_bpNLS + Q154S polypeptide sequence
MSEVEFSHEYWMRHALTLAKRARDEREVPVGAVLVLNNRVIGEGWNRAIGLHDPTAHAEIMALRQGGLVMQNYRLIDATLYVTFEPCVMCAGAMIHSRIGRVVFGVRNAKTGAAGSLMDVLHYPGMNHRVEITEGILADECAALLCYFFRMPRSVFNAQKKAQSSTDSGGSSGGSSGSETPGTSESATPESSGGSSGGSDKKYSIGLAIGTNSVGWAVITDEYKVPSKKFKVLGNTDRHSIKKNLIGALLFDSGETAEATRLKRTARRRYTRRKNRICYLQEIFSNEMAKVDDSFFHRLEESFLVEEDKKHERHPIFGNIVDEVAYHEKYPTIYHLRKKLVDSTDKADLRLIYLALAHMIKFRGHFLIEGDLNPDNSDVDKLFIQLVQTYNQLFEENPINASGVDAKAILSARLSKSRRLENLIAQLPGEKKNGLFGNLIALSLGLTPNFKSNFDLAEDAKLQLSKDTYDDDLDNLLAQIGDQYADLFLAAKNLSDAILLSDILRVNTEITKAPLSASMIKRYDEHHQDLTLLKALVRQQLPEKYKEIFFDQSKNGYAGYIDGGASQEEFYKFIKPILEKMDGTEELLVKLNREDLLRKQRTFDNGSIPHQIHLGELHAILRRQEDFYPFLKDNREKIEKILTFRIPYYVGPLARGNSRFAWMTRKSEETITPWNFEEVVDKGASAQSFIERMTNFDKNLPNEKVLPKHSLLYEYFTVYNELTKVKYVTEGMRKPAFLSGEQKKAIVDLLFKTNRKVTVKQLKEDYFKKIECFDSVEISGVEDRFNASLGTYHDLLKIIKDKDFLDNEENEDILEDIVLTLTLFEDREMIEERLKTYAHLFDDKVMKQLKRRRYTGWGRLSRKLINGIRDKQSGKTILDFLKSDGFANRNFMQLIHDDSLTFKEDIQKAQVSGQGDSLHEHIANLAGSPAIKKGILQTVKVVDELVKVMGRHKPENIVIEMARENQTTQKGQKNSRERMKRIEEGIKELGSQILKEHPVENTQLQNEKLYLYYLQNGRDMYVDQELDINRLSDYDVDHIVPQSFLKDDSIDNKVLTRSDKNRGKSDNVPSEEVVKKMKNYWRQLLNAKLITQRKFDNLTKAERGGLSELDKAGFIKRQLVETRQITKHVAQILDSRMNTKYDENDKLIREVKVITLKSKLVSDFRKDFQFYKVREINNYHHAHDAYLNAVVGTALIKKYPKLESEFVYGDYKVYDVRKMIAKSEQEIGKATAKYFFYSNIMNFFKTEITLANGEIRKRPLIETNGETGEIVWDKGRDFATVRKVLSMPQVNIVKKTEVQTGGFSKESILPKRNSDKLIARKKDWDPKKYGGFVSPTVAYSVLVVAKVEKGKSKKLKSVKELLGITIMERSSFEKNPIDFLEAKGYKEVKKDLIIKLPKYSLFELENGRKRMLASARELQKGNELALPSKYVNFLYLASHYEKLKGSPEDNEQKQLFVEQHKHYLDEIIEQISEFSKRVILADANLDKVLSAYNKHRDKPIREQAENIIHLFTLTNLGAPAAFKYFDTTIDRKQYRSTKEVLDATLIHQSITGLYETRIDLSQLGGDEGADKRTADGSEFESPKKKRKV

SEQ ID NO: 344 - protein, 1588 aa, synthetic construct
  REGION 1..1588: note = 04. monoABE8.1_bpNLS + Y123H polypeptide sequence
MSEVEFSHEYWMRHALTLAKRARDEREVPVGAVLVLNNRVIGEGWNRAIGLHDPTAHAEIMALRQGGLVMQNYRLIDATLYVTFEPCVMCAGAMIHSRIGRVVFGVRNAKTGAAGSLMDVLHHPGMNHRVEITEGILADECAALLCYFFRMPRQVFNAQKKAQSSTDSGGSSGGSSGSETPGTSESATPESSGGSSGGSDKKYSIGLAIGTNSVGWAVITDEYKVPSKKFKVLGNTDRHSIKKNLIGALLFDSGETAEATRLKRTARRRYTRRKNRICYLQEIFSNEMAKVDDSFFHRLEESFLVEEDKKHERHPIFGNIVDEVAYHEKYPTIYHLRKKLVDSTDKADLRLIYLALAHMIKFRGHFLIEGDLNPDNSDVDKLFIQLVQTYNQLFEENPINASGVDAKAILSARLSKSRRLENLIAQLPGEKKNGLFGNLIALSLGLTPNFKSNFDLAEDAKLQLSKDTYDDDLDNLLAQIGDQYADLFLAAKNLSDAILLSDILRVNTEITKAPLSASMIKRYDEHHQDLTLLKALVRQQLPEKYKEIFFDQSKNGYAGYIDGGASQEEFYKFIKPILEKMDGTEELLVKLNREDLLRKQRTFDNGSIPHQIHLGELHAILRRQEDFYPFLKDNREKIEKILTFRIPYYVGPLARGNSRFAWMTRKSEETITPWNFEEVVDKGASAQSFIERMTNFDKNLPNEKVLPKHSLLYEYFTVYNELTKVKYVTEGMRKPAFLSGEQKKAIVDLLFKTNRKVTVKQLKEDYFKKIECFDSVEISGVEDRFNASLGTYHDLLKIIKDKDFLDNEENEDILEDIVLTLTLFEDREMIEERLKTYAHLFDDKVMKQLKRRRYTGWGRLSRKLINGIRDKQSGKTILDFLKSDGFANRNFMQLIHDDSLTFKEDIQKAQVSGQGDSLHEHIANLAGSPAIKKGILQTVKVVDELVKVMGRHKPENIVIEMARENQTTQKGQKNSRERMKRIEEGIKELGSQILKEHPVENTQLQNEKLYLYYLQNGRDMYVDQELDINRLSDYDVDHIVPQSFLKDDSIDNKVLTRSDKNRGKSDNVPSEEVVKKMKNYWRQLLNAKLITQRKFDNLTKAERGGLSELDKAGFIKRQLVETRQITKHVAQILDSRMNTKYDENDKLIREVKVITLKSKLVSDFRKDFQFYKVREINNYHHAHDAYLNAVVGTALIKKYPKLESEFVYGDYKVYDVRKMIAKSEQEIGKATAKYFFYSNIMNFFKTEITLANGEIRKRPLIETNGETGEIVWDKGRDFATVRKVLSMPQVNIVKKTEVQTGGFSKESILPKRNSDKLIARKKDWDPKKYGGFVSPTVAYSVLVVAKVEKGKSKKLKSVKELLGITIMERSSFEKNPIDFLEAKGYKEVKKDLIIKLPKYSLFELENGRKRMLASARELQKGNELALPSKYVNFLYLASHYEKLKGSPEDNEQKQLFVEQHKHYLDEIIEQISEFSKRVILADANLDKVLSAYNKHRDKPIREQAENIIHLFTLTNLGAPAAFKYFDTTIDRKQYRSTKEVLDATLIHQSITGLYETRIDLSQLGGDEGADKRTADGSEFESPKKKRKV

SEQ ID NO: 345 - protein, 1588 aa, synthetic construct
  REGION 1..1588: note = 05. monoABE8.1_bpNLS + V82S polypeptide sequence
MSEVEFSHEYWMRHALTLAKRARDEREVPVGAVLVLNNRVIGEGWNRAIGLHDPTAHAEIMALRQGGLVMQNYRLIDATLYSTFEPCVMCAGAMIHSRIGRVVFGVRNAKTGAAGSLMDVLHYPGMNHRVEITEGILADECAALLCYFFRMPRQVFNAQKKAQSSTDSGGSSGGSSGSETPGTSESATPESSGGSSGGSDKKYSIGLAIGTNSVGWAVITDEYKVPSKKFKVLGNTDRHSIKKNLIGALLFDSGETAEATRLKRTARRRYTRRKNRICYLQEIFSNEMAKVDDSFFHRLEESFLVEEDKKHERHPIFGNIVDEVAYHEKYPTIYHLRKKLVDSTDKADLRLIYLALAHMIKFRGHFLIEGDLNPDNSDVDKLFIQLVQTYNQLFEENPINASGVDAKAILSARLSKSRRLENLIAQLPGEKKNGLFGNLIALSLGLTPNFKSNFDLAEDAKLQLSKDTYDDDLDNLLAQIGDQYADLFLAAKNLSDAILLSDILRVNTEITKAPLSASMIKRYDEHHQDLTLLKALVRQQLPEKYKEIFFDQSKNGYAGYIDGGASQEEFYKFIKPILEKMDGTEELLVKLNREDLLRKQRTFDNGSIPHQIHLGELHAILRRQEDFYPFLKDNREKIEKILTFRIPYYVGPLARGNSRFAWMTRKSEETITPWNFEEVVDKGASAQSFIERMTNFDKNLPNEKVLPKHSLLYEYFTVYNELTKVKYVTEGMRKPAFLSGEQKKAIVDLLFKTNRKVTVKQLKEDYFKKIECFDSVEISGVEDRFNASLGTYHDLLKIIKDKDFLDNEENEDILEDIVLTLTLFEDREMIEERLKTYAHLFDDKVMKQLKRRRYTGWGRLSRKLINGIRDKQSGKTILDFLKSDGFANRNFMQLIHDDSLTFKEDIQKAQVSGQGDSLHEHIANLAGSPAIKKGILQTVKVVDELVKVMGRHKPENIVIEMARENQTTQKGQKNSRERMKRIEEGIKELGSQILKEHPVENTQLQNEKLYLYYLQNGRDMYVDQELDINRLSDYDVDHIVPQSFLKDDSIDNKVLTRSDKNRGKSDNVPSEEVVKKMKNYWRQLLNAKLITQRKFDNLTKAERGGLSELDKAGFIKRQLVETRQITKHVAQILDSRMNTKYDENDKLIREVKVITLKSKLVSDFRKDFQFYKVREINNYHHAHDAYLNAVVGTALIKKYPKLESEFVYGDYKVYDVRKMIAKSEQEIGKATAKYFFYSNIMNFFKTEITLANGEIRKRPLIETNGETGEIVWDKGRDFATVRKVLSMPQVNIVKKTEVQTGGFSKESILPKRNSDKLIARKKDWDPKKYGGFVSPTVAYSVLVVAKVEKGKSKKLKSVKELLGITIMERSSFEKNPIDFLEAKGYKEVKKDLIIKLPKYSLFELENGRKRMLASARELQKGNELALPSKYVNFLYLASHYEKLKGSPEDNEQKQLFVEQHKHYLDEIIEQISEFSKRVILADANLDKVLSAYNKHRDKPIREQAENIIHLFTLTNLGAPAAFKYFDTTIDRKQYRSTKEVLDATLIHQSITGLYETRIDLSQLGGDEGADKRTADGSEFESPKKKRKV

SEQ ID NO: 346 - protein, 1588 aa, synthetic construct
  REGION 1..1588: note = 06. monoABE8.1_bpNLS + T166R polypeptide sequence
MSEVEFSHEYWMRHALTLAKRARDEREVPVGAVLVLNNRVIGEGWNRAIGLHDPTAHAEIMALRQGGLVMQNYRLIDATLYVTFEPCVMCAGAMIHSRIGRVVFGVRNAKTGAAGSLMDVLHYPGMNHRVEITEGILADECAALLCYFFRMPRQVFNAQKKAQSSRDSGGSSGGSSGSETPGTSESATPESSGGSSGGSDKKYSIGLAIGTNSVGWAVITDEYKVPSKKFKVLGNTDRHSIKKNLIGALLFDSGETAEATRLKRTARRRYTRRKNRICYLQEIFSNEMAKVDDSFFHRLEESFLVEEDKKHERHPIFGNIVDEVAYHEKYPTIYHLRKKLVDSTDKADLRLIYLALAHMIKFRGHFLIEGDLNPDNSDVDKLFIQLVQTYNQLFEENPINASGVDAKAILSARLSKSRRLENLIAQLPGEKKNGLFGNLIALSLGLTPNFKSNFDLAEDAKLQLSKDTYDDDLDNLLAQIGDQYADLFLAAKNLSDAILLSDILRVNTEITKAPLSASMIKRYDEHHQDLTLLKALVRQQLPEKYKEIFFDQSKNGYAGYIDGGASQEEFYKFIKPILEKMDGTEELLVKLNREDLLRKQRTFDNGSIPHQIHLGELHAILRRQEDFYPFLKDNREKIEKILTFRIPYYVGPLARGNSRFAWMTRKSEETITPWNFEEVVDKGASAQSFIERMTNFDKNLPNEKVLPKHSLLYEYFTVYNELTKVKYVTEGMRKPAFLSGEQKKAIVDLLFKTNRKVTVKQLKEDYFKKIECFDSVEISGVEDRFNASLGTYHDLLKIIKDKDFLDNEENEDILEDIVLTLTLFEDREMIEERLKTYAHLFDDKVMKQLKRRRYTGWGRLSRKLINGIRDKQSGKTILDFLKSDGFANRNFMQLIHDDSLTFKEDIQKAQVSGQGDSLHEHIANLAGSPAIKKGILQTVKVVDELVKVMGRHKPENIVIEMARENQTTQKGQKNSRERMKRIEEGIKELGSQILKEHPVENTQLQNEKLYLYYLQNGRDMYVDQELDINRLSDYDVDHIVPQSFLKDDSIDNKVLTRSDKNRGKSDNVPSEEVVKKMKNYWRQLLNAKLITQRKFDNLTKAERGGLSELDKAGFIKRQLVETRQITKHVAQILDSRMNTKYDENDKLIREVKVITLKSKLVSDFRKDFQFYKVREINNYHHAHDAYLNAVVGTALIKKYPKLESEFVYGDYKVYDVRKMIAKSEQEIGKATAKYFFYSNIMNFFKTEITLANGEIRKRPLIETNGETGEIVWDKGRDFATVRKVLSMPQVNIVKKTEVQTGGFSKESILPKRNSDKLIARKKDWDPKKYGGFVSPTVAYSVLVVAKVEKGKSKKLKSVKELLGITIMERSSFEKNPIDFLEAKGYKEVKKDLIIKLPKYSLFELENGRKRMLASARELQKGNELALPSKYVNFLYLASHYEKLKGSPEDNEQKQLFVEQHKHYLDEIIEQISEFSKRVILADANLDKVLSAYNKHRDKPIREQAENIIHLFTLTNLGAPAAFKYFDTTIDRKQYRSTKEVLDATLIHQSITGLYETRIDLSQLGGDEGADKRTADGSEFESPKKKRKV

SEQ ID NO: 347 - protein, 1588 aa, synthetic construct
  REGION 1..1588: note = 07. monoABE8.1_bpNLS + Q154R polypeptide sequence
MSEVEFSHEYWMRHALTLAKRARDEREVPVGAVLVLNNRVIGEGWNRAIGLHDPTAHAEIMALRQGGLVMQNYRLIDATLYVTFEPCVMCAGAMIHSRIGRVVFGVRNAKTGAAGSLMDVLHYPGMNHRVEITEGILADECAALLCYFFRMPRRVFNAQKKAQSSTDSGGSSGGSSGSETPGTSESATPESSGGSSGGSDKKYSIGLAIGTNSVGWAVITDEYKVPSKKFKVLGNTDRHSIKKNLIGALLFDSGETAEATRLKRTARRRYTRRKNRICYLQEIFSNEMAKVDDSFFHRLEESFLVEEDKKHERHPIFGNIVDEVAYHEKYPTIYHLRKKLVDSTDKADLRLIYLALAHMIKFRGHFLIEGDLNPDNSDVDKLFIQLVQTYNQLFEENPINASGVDAKAILSARLSKSRRLENLIAQLPGEKKNGLFGNLIALSLGLTPNFKSNFDLAEDAKLQLSKDTYDDDLDNLLAQIGDQYADLFLAAKNLSDAILLSDILRVNTEITKAPLSASMIKRYDEHHQDLTLLKALVRQQLPEKYKEIFFDQSKNGYAGYIDGGASQEEFYKFIKPILEKMDGTEELLVKLNREDLLRKQRTFDNGSIPHQIHLGELHAILRRQEDFYPFLKDNREKIEKILTFRIPYYVGPLARGNSRFAWMTRKSEETITPWNFEEVVDKGASAQSFIERMTNFDKNLPNEKVLPKHSLLYEYFTVYNELTKVKYVTEGMRKPAFLSGEQKKAIVDLLFKTNRKVTVKQLKEDYFKKIECFDSVEISGVEDRFNASLGTYHDLLKIIKDKDFLDNEENEDILEDIVLTLTLFEDREMIEERLKTYAHLFDDKVMKQLKRRRYTGWGRLSRKLINGIRDKQSGKTILDFLKSDGFANRNFMQLIHDDSLTFKEDIQKAQVSGQGDSLHEHIANLAGSPAIKKGILQTVKVVDELVKVMGRHKPENIVIEMARENQTTQKGQKNSRERMKRIEEGIKELGSQILKEHPVENTQLQNEKLYLYYLQNGRDMYVDQELDINRLSDYDVDHIVPQSFLKDDSIDNKVLTRSDKNRGKSDNVPSEEVVKKMKNYWRQLLNAKLITQRKFDNLTKAERGGLSELDKAGFIKRQLVETRQITKHVAQILDSRMNTKYDENDKLIREVKVITLKSKLVSDFRKDFQFYKVREINNYHHAHDAYLNAVVGTALIKKYPKLESEFVYGDYKVYDVRKMIAKSEQEIGKATAKYFFYSNIMNFFKTEITLANGEIRKRPLIETNGETGEIVWDKGRDFATVRKVLSMPQVNIVKKTEVQTGGFSKESILPKRNSDKLIARKKDWDPKKYGGFVSPTVAYSVLVVAKVEKGKSKKLKSVKELLGITIMERSSFEKNPIDFLEAKGYKEVKKDLIIKLPKYSLFELENGRKRMLASARELQKGNELALPSKYVNFLYLASHYEKLKGSPEDNEQKQLFVEQHKHYLDEIIEQISEFSKRVILADANLDKVLSAYNKHRDKPIREQAENIIHLFTLTNLGAPAAFKYFDTTIDRKQYRSTKEVLDATLIHQSITGLYETRIDLSQLGGDEGADKRTADGSEFESPKKKRKV

SEQ ID NO: 348 - protein, 1588 aa, synthetic construct
  REGION 1..1588: note = 08. monoABE8.1_bpNLS +Y147R_Q154R_Y123H polypeptide sequence
MSEVEFSHEYWMRHALTLAKRARDEREVPVGAVLVLNNRVIGEGWNRAIGLHDPTAHAEIMALRQGGLVMQNYRLIDATLYVTFEPCVMCAGAMIHSRIGRVVFGVRNAKTGAAGSLMDVLHHPGMNHRVEITEGILADECAALLCRFFRMPRRVFNAQKKAQSSTDSGGSSGGSSGSETPGTSESATPESSGGSSGGSDKKYSIGLAIGTNSVGWAVITDEYKVPSKKFKVLGNTDRHSIKKNLIGALLFDSGETAEATRLKRTARRRYTRRKNRICYLQEIFSNEMAKVDDSFFHRLEESFLVEEDKKHERHPIFGNIVDEVAYHEKYPTIYHLRKKLVDSTDKADLRLIYLALAHMIKFRGHFLIEGDLNPDNSDVDKLFIQLVQTYNQLFEENPINASGVDAKAILSARLSKSRRLENLIAQLPGEKKNGLFGNLIALSLGLTPNFKSNFDLAEDAKLQLSKDTYDDDLDNLLAQIGDQYADLFLAAKNLSDAILLSDILRVNTEITKAPLSASMIKRYDEHHQDLTLLKALVRQQLPEKYKEIFFDQSKNGYAGYIDGGASQEEFYKFIKPILEKMDGTEELLVKLNREDLLRKQRTFDNGSIPHQIHLGELHAILRRQEDFYPFLKDNREKIEKILTFRIPYYVGPLARGNSRFAWMTRKSEETITPWNFEEVVDKGASAQSFIERMTNFDKNLPNEKVLPKHSLLYEYFTVYNELTKVKYVTEGMRKPAFLSGEQKKAIVDLLFKTNRKVTVKQLKEDYFKKIECFDSVEISGVEDRFNASLGTYHDLLKIIKDKDFLDNEENEDILEDIVLTLTLFEDREMIEERLKTYAHLFDDKVMKQLKRRRYTGWGRLSRKLINGIRDKQSGKTILDFLKSDGFANRNFMQLIHDDSLTFKEDIQKAQVSGQGDSLHEHIANLAGSPAIKKGILQTVKVVDELVKVMGRHKPENIVIEMARENQTTQKGQKNSRERMKRIEEGIKELGSQILKEHPVENTQLQNEKLYLYYLQNGRDMYVDQELDINRLSDYDVDHIVPQSFLKDDSIDNKVLTRSDKNRGKSDNVPSEEVVKKMKNYWRQLLNAKLITQRKFDNLTKAERGGLSELDKAGFIKRQLVETRQITKHVAQILDSRMNTKYDENDKLIREVKVITLKSKLVSDFRKDFQFYKVREINNYHHAHDAYLNAVVGTALIKKYPKLESEFVYGDYKVYDVRKMIAKSEQEIGKATAKYFFYSNIMNFFKTEITLANGEIRKRPLIETNGETGEIVWDKGRDFATVRKVLSMPQVNIVKKTEVQTGGFSKESILPKRNSDKLIARKKDWDPKKYGGFVSPTVAYSVLVVAKVEKGKSKKLKSVKELLGITIMERSSFEKNPIDFLEAKGYKEVKKDLIIKLPKYSLFELENGRKRMLASARELQKGNELALPSKYVNFLYLASHYEKLKGSPEDNEQKQLFVEQHKHYLDEIIEQISEFSKRVILADANLDKVLSAYNKHRDKPIREQAENIIHLFTLTNLGAPAAFKYFDTTIDRKQYRSTKEVLDATLIHQSITGLYETRIDLSQLGGDEGADKRTADGSEFESPKKKRKV

SEQ ID NO: 349 - protein, 1588 aa, synthetic construct
  REGION 1..1588: note = 09. monoABE8.1_bpNLS +Y147R_Q154R_I76Y polypeptide sequence
MSEVEFSHEYWMRHALTLAKRARDEREVPVGAVLVLNNRVIGEGWNRAIGLHDPTAHAEIMALRQGGLVMQNYRLYDATLYVTFEPCVMCAGAMIHSRIGRVVFGVRNAKTGAAGSLMDVLHYPGMNHRVEITEGILADECAALLCRFFRMPRRVFNAQKKAQSSTDSGGSSGGSSGSETPGTSESATPESSGGSSGGSDKKYSIGLAIGTNSVGWAVITDEYKVPSKKFKVLGNTDRHSIKKNLIGALLFDSGETAEATRLKRTARRRYTRRKNRICYLQEIFSNEMAKVDDSFFHRLEESFLVEEDKKHERHPIFGNIVDEVAYHEKYPTIYHLRKKLVDSTDKADLRLIYLALAHMIKFRGHFLIEGDLNPDNSDVDKLFIQLVQTYNQLFEENPINASGVDAKAILSARLSKSRRLENLIAQLPGEKKNGLFGNLIALSLGLTPNFKSNFDLAEDAKLQLSKDTYDDDLDNLLAQIGDQYADLFLAAKNLSDAILLSDILRVNTEITKAPLSASMIKRYDEHHQDLTLLKALVRQQLPEKYKEIFFDQSKNGYAGYIDGGASQEEFYKFIKPILEKMDGTEELLVKLNREDLLRKQRTFDNGSIPHQIHLGELHAILRRQEDFYPFLKDNREKIEKILTFRIPYYVGPLARGNSRFAWMTRKSEETITPWNFEEVVDKGASAQSFIERMTNFDKNLPNEKVLPKHSLLYEYFTVYNELTKVKYVTEGMRKPAFLSGEQKKAIVDLLFKTNRKVTVKQLKEDYFKKIECFDSVEISGVEDRFNASLGTYHDLLKIIKDKDFLDNEENEDILEDIVLTLTLFEDREMIEERLKTYAHLFDDKVMKQLKRRRYTGWGRLSRKLINGIRDKQSGKTILDFLKSDGFANRNFMQLIHDDSLTFKEDIQKAQVSGQGDSLHEHIANLAGSPAIKKGILQTVKVVDELVKVMGRHKPENIVIEMARENQTTQKGQKNSRERMKRIEEGIKELGSQILKEHPVENTQLQNEKLYLYYLQNGRDMYVDQELDINRLSDYDVDHIVPQSFLKDDSIDNKVLTRSDKNRGKSDNVPSEEVVKKMKNYWRQLLNAKLITQRKFDNLTKAERGGLSELDKAGFIKRQLVETRQITKHVAQILDSRMNTKYDENDKLIREVKVITLKSKLVSDFRKDFQFYKVREINNYHHAHDAYLNAVVGTALIKKYPKLESEFVYGDYKVYDVRKMIAKSEQEIGKATAKYFFYSNIMNFFKTEITLANGEIRKRPLIETNGETGEIVWDKGRDFATVRKVLSMPQVNIVKKTEVQTGGFSKESILPKRNSDKLIARKKDWDPKKYGGFVSPTVAYSVLVVAKVEKGKSKKLKSVKELLGITIMERSSFEKNPIDFLEAKGYKEVKKDLIIKLPKYSLFELENGRKRMLASARELQKGNELALPSKYVNFLYLASHYEKLKGSPEDNEQKQLFVEQHKHYLDEIIEQISEFSKRVILADANLDKVLSAYNKHRDKPIREQAENIIHLFTLTNLGAPAAFKYFDTTIDRKQYRSTKEVLDATLIHQSITGLYETRIDLSQLGGDEGADKRTADGSEFESPKKKRKV

SEQ ID NO: 350 - protein, 1588 aa, synthetic construct
  REGION 1..1588: note = 10. monoABE8.1_bpNLS +Y147R_Q154R_T166R polypeptide sequence
MSEVEFSHEYWMRHALTLAKRARDEREVPVGAVLVLNNRVIGEGWNRAIGLHDPTAHAEIMALRQGGLVMQNYRLIDATLYVTFEPCVMCAGAMIHSRIGRVVFGVRNAKTGAAGSLMDVLHYPGMNHRVEITEGILADECAALLCRFFRMPRRVFNAQKKAQSSRDSGGSSGGSSGSETPGTSESATPESSGGSSGGSDKKYSIGLAIGTNSVGWAVITDEYKVPSKKFKVLGNTDRHSIKKNLIGALLFDSGETAEATRLKRTARRRYTRRKNRICYLQEIFSNEMAKVDDSFFHRLEESFLVEEDKKHERHPIFGNIVDEVAYHEKYPTIYHLRKKLVDSTDKADLRLIYLALAHMIKFRGHFLIEGDLNPDNSDVDKLFIQLVQTYNQLFEENPINASGVDAKAILSARLSKSRRLENLIAQLPGEKKNGLFGNLIALSLGLTPNFKSNFDLAEDAKLQLSKDTYDDDLDNLLAQIGDQYADLFLAAKNLSDAILLSDILRVNTEITKAPLSASMIKRYDEHHQDLTLLKALVRQQLPEKYKEIFFDQSKNGYAGYIDGGASQEEFYKFIKPILEKMDGTEELLVKLNREDLLRKQRTFDNGSIPHQIHLGELHAILRRQEDFYPFLKDNREKIEKILTFRIPYYVGPLARGNSRFAWMTRKSEETITPWNFEEVVDKGASAQSFIERMTNFDKNLPNEKVLPKHSLLYEYFTVYNELTKVKYVTEGMRKPAFLSGEQKKAIVDLLFKTNRKVTVKQLKEDYFKKIECFDSVEISGVEDRFNASLGTYHDLLKIIKDKDFLDNEENEDILEDIVLTLTLFEDREMIEERLKTYAHLFDDKVMKQLKRRRYTGWGRLSRKLINGIRDKQSGKTILDFLKSDGFANRNFMQLIHDDSLTFKEDIQKAQVSGQGDSLHEHIANLAGSPAIKKGILQTVKVVDELVKVMGRHKPENIVIEMARENQTTQKGQKNSRERMKRIEEGIKELGSQILKEHPVENTQLQNEKLYLYYLQNGRDMYVDQELDINRLSDYDVDHIVPQSFLKDDSIDNKVLTRSDKNRGKSDNVPSEEVVKKMKNYWRQLLNAKLITQRKFDNLTKAERGGLSELDKAGFIKRQLVETRQITKHVAQILDSRMNTKYDENDKLIREVKVITLKSKLVSDFRKDFQFYKVREINNYHHAHDAYLNAVVGTALIKKYPKLESEFVYGDYKVYDVRKMIAKSEQEIGKATAKYFFYSNIMNFFKTEITLANGEIRKRPLIETNGETGEIVWDKGRDFATVRKVLSMPQVNIVKKTEVQTGGFSKESILPKRNSDKLIARKKDWDPKKYGGFVSPTVAYSVLVVAKVEKGKSKKLKSVKELLGITIMERSSFEKNPIDFLEAKGYKEVKKDLIIKLPKYSLFELENGRKRMLASARELQKGNELALPSKYVNFLYLASHYEKLKGSPEDNEQKQLFVEQHKHYLDEIIEQISEFSKRVILADANLDKVLSAYNKHRDKPIREQAENIIHLFTLTNLGAPAAFKYFDTTIDRKQYRSTKEVLDATLIHQSITGLYETRIDLSQLGGDEGADKRTADGSEFESPKKKRKV

SEQ ID NO: 351 - protein, 1588 aa, synthetic construct
  REGION 1..1588: note = 11. monoABE8.1_bpNLS +Y147T_Q154R polypeptide sequence
MSEVEFSHEYWMRHALTLAKRARDEREVPVGAVLVLNNRVIGEGWNRAIGLHDPTAHAEIMALRQGGLVMQNYRLIDATLYVTFEPCVMCAGAMIHSRIGRVVFGVRNAKTGAAGSLMDVLHYPGMNHRVEITEGILADECAALLCTFFRMPRRVFNAQKKAQSSTDSGGSSGGSSGSETPGTSESATPESSGGSSGGSDKKYSIGLAIGTNSVGWAVITDEYKVPSKKFKVLGNTDRHSIKKNLIGALLFDSGETAEATRLKRTARRRYTRRKNRICYLQEIFSNEMAKVDDSFFHRLEESFLVEEDKKHERHPIFGNIVDEVAYHEKYPTIYHLRKKLVDSTDKADLRLIYLALAHMIKFRGHFLIEGDLNPDNSDVDKLFIQLVQTYNQLFEENPINASGVDAKAILSARLSKSRRLENLIAQLPGEKKNGLFGNLIALSLGLTPNFKSNFDLAEDAKLQLSKDTYDDDLDNLLAQIGDQYADLFLAAKNLSDAILLSDILRVNTEITKAPLSASMIKRYDEHHQDLTLLKALVRQQLPEKYKEIFFDQSKNGYAGYIDGGASQEEFYKFIKPILEKMDGTEELLVKLNREDLLRKQRTFDNGSIPHQIHLGELHAILRRQEDFYPFLKDNREKIEKILTFRIPYYVGPLARGNSRFAWMTRKSEETITPWNFEEVVDKGASAQSFIERMTNFDKNLPNEKVLPKHSLLYEYFTVYNELTKVKYVTEGMRKPAFLSGEQKKAIVDLLFKTNRKVTVKQLKEDYFKKIECFDSVEISGVEDRFNASLGTYHDLLKIIKDKDFLDNEENEDILEDIVLTLTLFEDREMIEERLKTYAHLFDDKVMKQLKRRRYTGWGRLSRKLINGIRDKQSGKTILDFLKSDGFANRNFMQLIHDDSLTFKEDIQKAQVSGQGDSLHEHIANLAGSPAIKKGILQTVKVVDELVKVMGRHKPENIVIEMARENQTTQKGQKNSRERMKRIEEGIKELGSQILKEHPVENTQLQNEKLYLYYLQNGRDMYVDQELDINRLSDYDVDHIVPQSFLKDDSIDNKVLTRSDKNRGKSDNVPSEEVVKKMKNYWRQLLNAKLITQRKFDNLTKAERGGLSELDKAGFIKRQLVETRQITKHVAQILDSRMNTKYDENDKLIREVKVITLKSKLVSDFRKDFQFYKVREINNYHHAHDAYLNAVVGTALIKKYPKLESEFVYGDYKVYDVRKMIAKSEQEIGKATAKYFFYSNIMNFFKTEITLANGEIRKRPLIETNGETGEIVWDKGRDFATVRKVLSMPQVNIVKKTEVQTGGFSKESILPKRNSDKLIARKKDWDPKKYGGFVSPTVAYSVLVVAKVEKGKSKKLKSVKELLGITIMERSSFEKNPIDFLEAKGYKEVKKDLIIKLPKYSLFELENGRKRMLASARELQKGNELALPSKYVNFLYLASHYEKLKGSPEDNEQKQLFVEQHKHYLDEIIEQISEFSKRVILADANLDKVLSAYNKHRDKPIREQAENIIHLFTLTNLGAPAAFKYFDTTIDRKQYRSTKEVLDATLIHQSITGLYETRIDLSQLGGDEGADKRTADGSEFESPKKKRKV

SEQ ID NO: 352 - protein, 1588 aa, synthetic construct
  REGION 1..1588: note = 12. monoABE8.1_bpNLS +Y147T_Q154S polypeptide sequence
MSEVEFSHEYWMRHALTLAKRARDEREVPVGAVLVLNNRVIGEGWNRAIGLHDPTAHAEIMALRQGGLVMQNYRLIDATLYVTFEPCVMCAGAMIHSRIGRVVFGVRNAKTGAAGSLMDVLHYPGMNHRVEITEGILADECAALLCTFFRMPRSVFNAQKKAQSSTDSGGSSGGSSGSETPGTSESATPESSGGSSGGSDKKYSIGLAIGTNSVGWAVITDEYKVPSKKFKVLGNTDRHSIKKNLIGALLFDSGETAEATRLKRTARRRYTRRKNRICYLQEIFSNEMAKVDDSFFHRLEESFLVEEDKKHERHPIFGNIVDEVAYHEKYPTIYHLRKKLVDSTDKADLRLIYLALAHMIKFRGHFLIEGDLNPDNSDVDKLFIQLVQTYNQLFEENPINASGVDAKAILSARLSKSRRLENLIAQLPGEKKNGLFGNLIALSLGLTPNFKSNFDLAEDAKLQLSKDTYDDDLDNLLAQIGDQYADLFLAAKNLSDAILLSDILRVNTEITKAPLSASMIKRYDEHHQDLTLLKALVRQQLPEKYKEIFFDQSKNGYAGYIDGGASQEEFYKFIKPILEKMDGTEELLVKLNREDLLRKQRTFDNGSIPHQIHLGELHAILRRQEDFYPFLKDNREKIEKILTFRIPYYVGPLARGNSRFAWMTRKSEETITPWNFEEVVDKGASAQSFIERMTNFDKNLPNEKVLPKHSLLYEYFTVYNELTKVKYVTEGMRKPAFLSGEQKKAIVDLLFKTNRKVTVKQLKEDYFKKIECFDSVEISGVEDRFNASLGTYHDLLKIIKDKDFLDNEENEDILEDIVLTLTLFEDREMIEERLKTYAHLFDDKVMKQLKRRRYTGWGRLSRKLINGIRDKQSGKTILDFLKSDGFANRNFMQLIHDDSLTFKEDIQKAQVSGQGDSLHEHIANLAGSPAIKKGILQTVKVVDELVKVMGRHKPENIVIEMARENQTTQKGQKNSRERMKRIEEGIKELGSQILKEHPVENTQLQNEKLYLYYLQNGRDMYVDQELDINRLSDYDVDHIVPQSFLKDDSIDNKVLTRSDKNRGKSDNVPSEEVVKKMKNYWRQLLNAKLITQRKFDNLTKAERGGLSELDKAGFIKRQLVETRQITKHVAQILDSRMNTKYDENDKLIREVKVITLKSKLVSDFRKDFQFYKVREINNYHHAHDAYLNAVVGTALIKKYPKLESEFVYGDYKVYDVRKMIAKSEQEIGKATAKYFFYSNIMNFFKTEITLANGEIRKRPLIETNGETGEIVWDKGRDFATVRKVLSMPQVNIVKKTEVQTGGFSKESILPKRNSDKLIARKKDWDPKKYGGFVSPTVAYSVLVVAKVEKGKSKKLKSVKELLGITIMERSSFEKNPIDFLEAKGYKEVKKDLIIKLPKYSLFELENGRKRMLASARELQKGNELALPSKYVNFLYLASHYEKLKGSPEDNEQKQLFVEQHKHYLDEIIEQISEFSKRVILADANLDKVLSAYNKHRDKPIREQAENIIHLFTLTNLGAPAAFKYFDTTIDRKQYRSTKEVLDATLIHQSITGLYETRIDLSQLGGDEGADKRTADGSEFESPKKKRKV

SEQ ID NO: 353 - protein, 1588 aa, synthetic construct
  REGION 1..1588: note = 13. monoABE8.1_bpNLS +H123Y123H_Y147R_Q154R_I76Y polypeptide sequence
MSEVEFSHEYWMRHALTLAKRARDEREVPVGAVLVLNNRVIGEGWNRAIGLHDPTAHAEIMALRQGGLVMQNYRLYDATLYVTFEPCVMCAGAMIHSRIGRVVFGVRNAKTGAAGSLMDVLHHPGMNHRVEITEGILADECAALLCRFFRMPRRVFNAQKKAQSSTDSGGSSGGSSGSETPGTSESATPESSGGSSGGSDKKYSIGLAIGTNSVGWAVITDEYKVPSKKFKVLGNTDRHSIKKNLIGALLFDSGETAEATRLKRTARRRYTRRKNRICYLQEIFSNEMAKVDDSFFHRLEESFLVEEDKKHERHPIFGNIVDEVAYHEKYPTIYHLRKKLVDSTDKADLRLIYLALAHMIKFRGHFLIEGDLNPDNSDVDKLFIQLVQTYNQLFEENPINASGVDAKAILSARLSKSRRLENLIAQLPGEKKNGLFGNLIALSLGLTPNFKSNFDLAEDAKLQLSKDTYDDDLDNLLAQIGDQYADLFLAAKNLSDAILLSDILRVNTEITKAPLSASMIKRYDEHHQDLTLLKALVRQQLPEKYKEIFFDQSKNGYAGYIDGGASQEEFYKFIKPILEKMDGTEELLVKLNREDLLRKQRTFDNGSIPHQIHLGELHAILRRQEDFYPFLKDNREKIEKILTFRIPYYVGPLARGNSRFAWMTRKSEETITPWNFEEVVDKGASAQSFIERMTNFDKNLPNEKVLPKHSLLYEYFTVYNELTKVKYVTEGMRKPAFLSGEQKKAIVDLLFKTNRKVTVKQLKEDYFKKIECFDSVEISGVEDRFNASLGTYHDLLKIIKDKDFLDNEENEDILEDIVLTLTLFEDREMIEERLKTYAHLFDDKVMKQLKRRRYTGWGRLSRKLINGIRDKQSGKTILDFLKSDGFANRNFMQLIHDDSLTFKEDIQKAQVSGQGDSLHEHIANLAGSPAIKKGILQTVKVVDELVKVMGRHKPENIVIEMARENQTTQKGQKNSRERMKRIEEGIKELGSQILKEHPVENTQLQNEKLYLYYLQNGRDMYVDQELDINRLSDYDVDHIVPQSFLKDDSIDNKVLTRSDKNRGKSDNVPSEEVVKKMKNYWRQLLNAKLITQRKFDNLTKAERGGLSELDKAGFIKRQLVETRQITKHVAQILDSRMNTKYDENDKLIREVKVITLKSKLVSDFRKDFQFYKVREINNYHHAHDAYLNAVVGTALIKKYPKLESEFVYGDYKVYDVRKMIAKSEQEIGKATAKYFFYSNIMNFFKTEITLANGEIRKRPLIETNGETGEIVWDKGRDFATVRKVLSMPQVNIVKKTEVQTGGFSKESILPKRNSDKLIARKKDWDPKKYGGFVSPTVAYSVLVVAKVEKGKSKKLKSVKELLGITIMERSSFEKNPIDFLEAKGYKEVKKDLIIKLPKYSLFELENGRKRMLASARELQKGNELALPSKYVNFLYLASHYEKLKGSPEDNEQKQLFVEQHKHYLDEIIEQISEFSKRVILADANLDKVLSAYNKHRDKPIREQAENIIHLFTLTNLGAPAAFKYFDTTIDRKQYRSTKEVLDATLIHQSITGLYETRIDLSQLGGDEGADKRTADGSEFESPKKKRKV

SEQ ID NO: 354 - protein, 1588 aa, synthetic construct
  REGION 1..1588: note = 14. monoABE8.1_bpNLS + V82S +Q154R polypeptide sequence
MSEVEFSHEYWMRHALTLAKRARDEREVPVGAVLVLNNRVIGEGWNRAIGLHDPTAHAEIMALRQGGLVMQNYRLIDATLYSTFEPCVMCAGAMIHSRIGRVVFGVRNAKTGAAGSLMDVLHYPGMNHRVEITEGILADECAALLCYFFRMPRRVFNAQKKAQSSTDSGGSSGGSSGSETPGTSESATPESSGGSSGGSDKKYSIGLAIGTNSVGWAVITDEYKVPSKKFKVLGNTDRHSIKKNLIGALLFDSGETAEATRLKRTARRRYTRRKNRICYLQEIFSNEMAKVDDSFFHRLEESFLVEEDKKHERHPIFGNIVDEVAYHEKYPTIYHLRKKLVDSTDKADLRLIYLALAHMIKFRGHFLIEGDLNPDNSDVDKLFIQLVQTYNQLFEENPINASGVDAKAILSARLSKSRRLENLIAQLPGEKKNGLFGNLIALSLGLTPNFKSNFDLAEDAKLQLSKDTYDDDLDNLLAQIGDQYADLFLAAKNLSDAILLSDILRVNTEITKAPLSASMIKRYDEHHQDLTLLKALVRQQLPEKYKEIFFDQSKNGYAGYIDGGASQEEFYKFIKPILEKMDGTEELLVKLNREDLLRKQRTFDNGSIPHQIHLGELHAILRRQEDFYPFLKDNREKIEKILTFRIPYYVGPLARGNSRFAWMTRKSEETITPWNFEEVVDKGASAQSFIERMTNFDKNLPNEKVLPKHSLLYEYFTVYNELTKVKYVTEGMRKPAFLSGEQKKAIVDLLFKTNRKVTVKQLKEDYFKKIECFDSVEISGVEDRFNASLGTYHDLLKIIKDKDFLDNEENEDILEDIVLTLTLFEDREMIEERLKTYAHLFDDKVMKQLKRRRYTGWGRLSRKLINGIRDKQSGKTILDFLKSDGFANRNFMQLIHDDSLTFKEDIQKAQVSGQGDSLHEHIANLAGSPAIKKGILQTVKVVDELVKVMGRHKPENIVIEMARENQTTQKGQKNSRERMKRIEEGIKELGSQILKEHPVENTQLQNEKLYLYYLQNGRDMYVDQELDINRLSDYDVDHIVPQSFLKDDSIDNKVLTRSDKNRGKSDNVPSEEVVKKMKNYWRQLLNAKLITQRKFDNLTKAERGGLSELDKAGFIKRQLVETRQITKHVAQILDSRMNTKYDENDKLIREVKVITLKSKLVSDFRKDFQFYKVREINNYHHAHDAYLNAVVGTALIKKYPKLESEFVYGDYKVYDVRKMIAKSEQEIGKATAKYFFYSNIMNFFKTEITLANGEIRKRPLIETNGETGEIVWDKGRDFATVRKVLSMPQVNIVKKTEVQTGGFSKESILPKRNSDKLIARKKDWDPKKYGGFVSPTVAYSVLVVAKVEKGKSKKLKSVKELLGITIMERSSFEKNPIDFLEAKGYKEVKKDLIIKLPKYSLFELENGRKRMLASARELQKGNELALPSKYVNFLYLASHYEKLKGSPEDNEQKQLFVEQHKHYLDEIIEQISEFSKRVILADANLDKVLSAYNKHRDKPIREQAENIIHLFTLTNLGAPAAFKYFDTTIDRKQYRSTKEVLDATLIHQSITGLYETRIDLSQLGGDEGADKRTADGSEFESPKKKRKV

SEQ ID NO: 355 - protein, 4 aa, synthetic construct
  REGION 1..4: note = synthetic peptide sequence
SGGS

SEQ ID NO: 356 - protein, 24 aa, synthetic construct
  REGION 1..24: note = synthetic peptide sequence
SGGSSGSETPGTSESATPESSGGS

SEQ ID NO: 357 - protein, 32 aa, synthetic construct
  REGION 1..32: note = synthetic polypeptide sequence
SGGSSGGSSGSETPGTSESATPESSGGSSGGS

SEQ ID NO: 358 - protein, 104 aa, synthetic construct
  REGION 1..104: note = synthetic polypeptide sequence
GGSGGSPGSPAGSPTSTEEGTSESATPESGPGTSTEPSEGSAPGSPAGSPTSTEEGTSTEPSEGSAPGTSTEPSEGSAPGTSESATPESGPGSEPATSGGSGGS

SEQ ID NO: 359 - protein, 24 aa, synthetic construct
  REGION 1..24: note = synthetic peptide sequence
SGGSSGGSSGSETPGTSESATPES

SEQ ID NO: 360 - protein, 40 aa, synthetic construct
  REGION 1..40: note = synthetic polypeptide sequence
SGGSSGGSSGSETPGTSESATPESSGGSSGGSSGGSSGGS

SEQ ID NO: 361 - protein, 64 aa, synthetic construct
  REGION 1..64: note = synthetic polypeptide sequence
SGGSSGGSSGSETPGTSESATPESSGGSSGGSSGGSSGGSSGSETPGTSESATPESSGGSSGGS

SEQ ID NO: 362 - protein, 92 aa, synthetic construct
  REGION 1..92: note = synthetic polypeptide sequence
PGSPAGSPTSTEEGTSESATPESGPGTSTEPSEGSAPGSPAGSPTSTEEGTSTEPSEGSAPGTSTEPSEGSAPGTSESATPESGPGSEPATS

SEQ ID NO: 363 - protein, 5 aa, synthetic construct
  REGION 1..5: note = synthetic peptide sequence
PAPAP

SEQ ID NO: 364 - protein, 6 aa, synthetic construct
  REGION 1..6: note = synthetic peptide sequence
PAPAPA

SEQ ID NO: 365 - protein, 7 aa, synthetic construct
  REGION 1..7: note = synthetic peptide sequence
PAPAPAP

SEQ ID NO: 366 - protein, 8 aa, synthetic construct
  REGION 1..8: note = synthetic peptide sequence
PAPAPAPA

SEQ ID NO: 367 - protein, 9 aa, synthetic construct
  REGION 1..9: note = synthetic peptide sequence
PAPAPAPAP

SEQ ID NO: 368 - protein, 15 aa, synthetic construct
  REGION 1..15: note = synthetic peptide sequence
PAPAPAPAPAPAPAP

SEQ ID NO: 369 - protein, 21 aa, synthetic construct
  REGION 1..21: note = synthetic peptide sequence
PAPAPAPAPAPAPAPAPAPAP

SEQ ID NO: 370-377 - skipped (8 entries)

SEQ ID NO: 378 - protein, 1081 aa, Neisseria meningitidis
  REGION 1..1081: note = MISC_FEATURE - Nme3Cas9; WP_002217928.1 type II CRISPR RNA-guided endonuclease Cas9 [Neisseria meningitidis]
  REGION 1..1081: note = MISC_FEATURE - NCBI Reference: WP_002217928.1; type II CRISPR RNA-guided endonuclease Cas9; Nme3Cas9 polypeptide sequence
MAAFKPNPINYILGLDIGIASVGWAMVEIDEEENPIRLIDLGVRVFERAEVPKTGDSLAMARRLARSVRRLTRRRAHRLLRARRLLKREGVLQAADFDENGLIKSLPNTPWQLRAAALDRKLTPLEWSAVLLHLIKHRGYLSQRKNEGETADKELGALLKGVADNAHALQTGDFRTPAELALNKFEKECGHIRNQRGDYSHTFSRKDLQAELNLLFEKQKEFGNPHVSGGLKEGIETLLMTQRPALSGDAVQKMLGHCTFEPAEPKAAKNTYTAERFIWLTKLNNLRILEQGSERPLTDTERATLMDEPYRKSKLTYAQARKLLSLEDTAFFKGLRYGKDNAEASTLMEMKAYHTISRALEKEGLKDKKSPLNLSPELQDEIGTAFSLFKTDEDITGRLKDRIQPEILEALLKHISFDKFVQISLKALRRIVPLMEQGKRYDEACAEIYGDHYGKKNTEEKIYLPPIPADEIRNPVVLRALSQARKVINGVVRRYGSPARIHIETAREVGKSFKDRKEIEKRQEENRKDREKAAAKFREYFPNFVGEPKSKDILKLRLYEQQHGKCLYSGKEINLGRLNEKGYVEIDHALPFSRTWDDSFNNKVLVLGSENQNKGNQTPYEYFNGKDNSREWQEFKARVETSRFPRSKKQRILLQKFDEDGFKERNLNDTRYVNRFLCQFVADRMRLTGKGKKRVFASNGQITNLLRGFWGLRKVRAENDRHHALDAVVVACSTVAMQQKITRFVRYKEMNAFDGKTIDKETGEVLHQKTHFPQPWEFFAQEVMIRVFGKPDGKPEFEEADTPEKLRTLLAEKLSSRPEAVHEYVTPLFVSRAPNRKMSGQGHMETVKSAKRLDEGVSVLRVPLTQLKLKDLEKMVNREREPKLYEALKARLEAHKDDPAKAFAEPFYKYDKAGNRTQQVKAVRVEQVQKTGVWVRNHNGIADNATMVRVDVFEKGDKYYLVPIYSWQVAKGILPDRAVVAYADEEDWTVIDESFRFKFVLYSNDLIKVQLKKDSFLGYFSGLDRATGAISLREHDLEKSKGKDGMHRIGVKTALSFQKYQIDEMGKEIRPCRLKKRPPVR

SEQ ID NO: 379 - RNA, 66 nt, synthetic construct
  misc_feature 1..66: note = Telomerase Ku Binding Motif oligonucleotide sequence
  source 1..66: mol_type = other RNA
ttcttgtcgtacttatagatcgctacgttatttcaattttgaaaatctgagtcctgggagtgcgga

SEQ ID NO: 380 - protein, 1094 aa, synthetic construct
  REGION 1..1094: note = Telomerase Ku Heterodimer polypeptide sequence
MSGWESYYKTEGDEEAEEEQEENLEASGDYKYSGRDSLIFLVDASKAMFESQSEDELTPFDMSIQCIQSVYISKIISSDRDLLAVVFYGTEKDKNSVNFKNIYVLQELDNPGAKRILELDQFKGQQGQKRFQDMMGHGSDYSLSEVLWVCANLFSDVQFKMSHKRIMLFTNEDNPHGNDSAKASRARTKAGDLRDTGIFLDLMHLKKPGGFDISLFYRDIISIAEDEDLRVHFEESSKLEDLLRKVRAKETRKRALSRLKLKLNKDIVISVGIYNLVQKALKPPPIKLYRETNEPVKTKTRTFNTSTGGLLLPSDTKRSQIYGSRQIILEKEETEELKRFDDPGLMLMGFKPLVLLKKHHYLRPSLFVYPEESLVIGSSTLFSALLIKCLEKEVAALCRYTPRRNIPPYFVALVPQEEELDDQKIQVTPPGFQLVFLPFADDKRKMPFTEKIMATPEQVGKMKAIVEKLRFTYRSDSFENPVLQQHFRNLEALALDLMEPEQAVDLTLPKVEAMNKRLGSLVDEFKELVYPPDYNPEGKVTKRKHDNEGSGSKRPKVEYSEEELKTHISKGTLGKFTVPMLKEACRAYGLKSGLKKQELLEALTKHFQDMVRSGNKAAVVLCMDVGFTMSNSIPGIESPFEQAKKVITMFVQRQVFAENKDEIALVLFGTDGTDNPLSGGDQYQNITVHRHLMLPDFDLLEDIESKIQPGSQQADFLDALIVSMDVIQHETIGKKFEKRHIEIFTDLSSRFSKSQLDIIIHSLKKCDISERHSIHWPCRLTIGSNLSIRIAAYKSILQERVKKTWTVVDAKTLKKEDIQKETVYCLNDDDETEVLKEDIIQGFRYGSDIVPFSKVDEEQMKYKSEGKCFSVLGFCKSSQVQRRFFMGNQVLKVFAARDDEAAAVALSSLIHALDDLDMVAIVRYAYDKRANPQVGVAFPHIKHNYECLVYVQLPFMEDLRQYMFSSLKNSKKYAPTEAQLNAVDALIDSMSLAKKDEKTDTLEDLFPTTKIPNPRFQRLFQCLLHRALHPREPLPPIQQHIWNMLNPPAEVTTKSQIPLSKIKTLFPLIEAKKKDQVTAQEIFQDNHEDGPTAK

SEQ ID NO: 381 - RNA, 10 nt, synthetic construct
  misc_feature 1..10: note = Telomerase Sm7 consensus site(single stranded) oligonucleotide sequence
  source 1..10: mol_type = other RNA
aatttttgga

SEQ ID NO: 382 - protein, 83 aa, synthetic construct
  REGION 1..83: note = MS2 coat protein polypeptide sequence
GSVIDVSSQRVNVQRPLDALGNSLNSPVIIKLKGDREFRGVLKSFDLHMNLVLNDAEELEDGEVTRRLGTVLIRGDNIVYISP

SEQ ID NO: 383 - RNA, 26 nt, synthetic construct
  misc_feature 1..26: note = PP7 phage operator stem loop oligonucleotide sequence
  source 1..26: mol_type = other RNA
ataaggagtttatatggaaaccctta

SEQ ID NO: 384 - protein, 128 aa, synthetic construct
  REGION 1..128: note = PP7 coat protein (PCP)polypeptide sequence
MSKTIVLSVGEATRTLTEIQSTADRQIFEEKVGPLVGRLRLTASLRQNGAKTAYRVNLKLDQADVVDCSTSVCGELPKVRYTQVWSHDVTIVANSTEASRKSLYDLTKSLVATSQVEDLVVNLVPLGR

SEQ ID NO: 385 - RNA, 19 nt, synthetic construct
  misc_feature 1..19: note = SfMu Com stem loop oligonucleotide sequence
  source 1..19: mol_type = other RNA
ctgaatgcctgcgagcatc

SEQ ID NO: 386 - protein, 62 aa, synthetic construct
  REGION 1..62: note = SfMu Com binding protein polypeptide sequence
MKSIRCKNCNKLLFKADSFDHIEIRCPRCKRHIIMLNACEHPTEKHCGKREKITHSDETVRY

SEQ ID NO: 387 - protein, 47 aa, synthetic construct
  REGION 1..47: note = leucine zipper polypeptide sequence
LEIRAAFLRQRNTALRTEVAELEQEVQRLENEVSQYETRYGPLGGGK

SEQ ID NO: 388 - protein, 47 aa, synthetic construct
  REGION 1..47: note = leucine zipper polypeptide sequence
LEIEAAFLERENTALETRVAELRQRVQRLRNRVSQYRTRYGPLGGGK

SEQ ID NO: 389-424 - skipped (36 entries)

SEQ ID NO: 425 - DNA, 88 bp, synthetic construct
  source 1..88: mol_type = other DNA; note = SaCas9 scaffold sequence
gttttagtactctgtaatgaaaattacagaatctactaaaacaaggcaaaatgccgtgtttatctcgtcaacttgttggcgagatttt

SEQ ID NO: 426-462 - skipped (37 entries)

SEQ ID NO: 463 - protein, 1147 aa, synthetic construct
MAPKKKRKVGIHGVPAAATRSFILKIEPNEEVKKGLWKTHEVLNHGIAYYMNILKLIRQEAIYEHHEQDPKNPKKVSKAEIQAELWDFVLKMQKCNSFTHEVDKDEVFNILRELYEELVPSSVEKKGEANQLSNKFLYPLVDPNSQSGKGTASSGRKPRWYNLKIAGDPSWEEEKKKWEEDKKKDPLAKILGKLAEYGLIPLFIPYTDSNEPIVKEIKWMEKSRNQSVRRLDKDMFIQALERFLSWESWNLKVKEEYEKVEKEYKTLEERIKEDIQALKALEQYEKERQEQLLRDTLNTNEYRLSKRGLRGWREIIQKWLKMDENEPSEKYLEVFKDYQRKHPREAGDYSVYEFLSKKENHFIWRNHPEYPYLYATFCEIDKKKKDAKQQATFTLADPINHPLWVRFEERSGSNLNKYRILTEQLHTEKLKKKLTVQLDRLIYPTESGGWEEKGKVDIVLLPSRQFYNQIFLDIEEKGKHAFTYKDESIKFPLKGTLGGARVQFDRDHLRRYPHKVESGNVGRIYFNMTVNIEPTESPVSKSLKIHRDDFPKVVNFKPKELTEWIKDSKGKKLKSGIESLEIGLRVMSIDLGQRQAAAASIFEVVDQKPDIEGKLFFPIKGTELYAVHRASFNIKLPGETLVKSREVLRKAREDNLKLMNQKLNFLRNVLHFQQFEDITEREKRVTKWISRQENSDVPLVYQDELIQIRELMYKPYKDWVAFLKQLHKRLEVEIGKEVKHWRKSLSDGRKGLYGISLKNIDEIDRTRKFLLRWSLRPTEPGEVRRLEPGQRFAIDQLNHLNALKEDRLKKMANTIIMHALGYCYDVRKKKWQAKNPACQIILFEDLSNYNPYGERSRFENSRLMKWSRREIPRQVALQGEIYGLQVGEVGAQFSSRFHAKTGSPGIRCRVVTKEKLQDNRFFKNLQREGRLTLDKIAVLKEGDLYPDKGGEKFISLSKDRKCVTTHADINAAQNLQKRFWTRTHGFYKVYCKAYQVDGQTVYIPESKDQKQKIIEEFGEGYFILKDGVYEWVNAGKLKIKKGSSKQSSSELVDSDILKDSFDLASELKGEKLMLYRDPSGNVFPSDKWMAAGVFFGKLERILISKLTNQYSISTIEDDSSKQSMSGGSKRTADGSEFESPKKKRKVE

SEQ ID NO: 464 - protein, 147 aa, synthetic construct
MASHRLLLLCLAGLVFVSEAGPTGTGESKCPLMVKVLDAVRGSPAINVAVHVFRKAADDTWEPFASGKTSESGELHGLTTEEEFVEGIYKVEIDTKSYWKALGISPFHEHAEVVFTANDSGPRRYTIAALLSPYSYSTTAVVTNPKE

SEQ ID NO: 465 - DNA, 444 bp, Homo sapiens
  source 1..444: mol_type = genomic DNA
atggcttctcatcgtctgctcctcctctgccttgctggactggtatttgtgtctgaggctggccctacgggcaccggtgaatccaagtgtcctctgatggtcaaagttctagatgctgtccgaggcagtcctgccatcaatgtggccgtgcatgtgttcagaaaggctgctgatgacacctgggagccatttgcctctgggaaaaccagtgagtctggagagctgcatgggctcacaactgaggaggaatttgtagaagggatatacaaagtggaaatagacaccaaatcttactggaaggcacttggcatctccccattccatgagcatgcagaggtggtattcacagccaacgactccggcccccgccgctacaccattgccgccctgctgagcccctactcctattccaccacggctgtcgtcaccaatcccaaggaatga

SEQ ID NO: 466 - DNA, 14258 bp, Homo sapiens
  source 1..14258: mol_type = genomic DNA
ttatgtgtttattcaacaatggcggaggagaggcatgccagataaggcagacacgggcattccaaacacaagaaaggtatgtgctgcagagaagtcagataactttcctaggctctcctgcagtccggatgaaatactctcaaaaaattagcccgggccctttgctccaatttttcgcttacctagcaaccatctaactattaattaaattggtattatggttttaacatgaatcttttatgatttgcttaccattaatcaaacccccgaggcttattcacctcaaggggagctgacaaagttgaattattcaacctgcaaagatccagggcccccaaatactgtcatttccactctcccctaacccccaccatgaggcccagtctcagcactcggccagcctatgcccaactcggggtaatcagcttagacatattaatattagtgggcatttcagtatcaacagatcactgtctagcagctgacaggcaccctcagaaaataaaccaagaagaaagggtttatctataatatcaaaatttttcatagataaacctgcccattataaggaagagggcagaagaaccctaaactaagagccaggcaacttgttcattaatcacagcatattccatagaaggaggagaaatgttgtcatcaaattcatctttttcacctcaattaaacatctatgctacagctccacagtcagattgagaggaaaaacagtacgtagctaagaaaagacatagacttgtaactgaaatgcttcactggtgctccttttgttttaaggcattggatcttcatagctactgatcgtgcccaagcacacagtatctgcagcaaccacttaggcctccaggaatgtggtgaccattgaccctaattcattccccttcatggatcctatgtaaccatcctccaaaaagagctttcgcaaactcaaataaacacaggaaaggaagaccttcttatctttgagagtatatgtttagccctataaccctctcttatcataaattgcttcttaggcaagaaacactggatttttcttgtatttgtcattgccattggttccatacaagcattcatttaacaaataatacattccatctccgttttttgctttttccttcatgcttcggccttggttttctctcacctaaaacactacaagcttcttctcccagagctctcactttgactccagactacctacatttaatctttaattctctaccaaaattttctcttatctttatatctttttaattttaattttattttttgtggatacatagtaggtgtatatatttatggggtacatgcaatgttttaatacaggcatgcaatgtgaaataaggacatcatggagaatggggtatccatctcctcaagcatttatcttttcagttacaaacaatccaattacactctttattttaaaatatacaattattaattatagtcactctgttgtgctatcaaatagtagatcttattctttctattttttgtaccctctcgtctttttatattaaaaaataatctttatctctgtaagcttcatcagtgattttccaatgaaatttaggatcttctctataccctgaattgccttactttctccccacttccttgtcttattcaaatgcagatttcattaatgatttccagatcaatgatagttcagaaagcaagcaagtcaaagtgaccaagggcatggcctgaaaactgttctaagagaggaatttacagaacaactattaaatgatgtcaataggattgtattagtccgttttcatacggctataaagaactgcctgagactgggtaatttataaaggaaagaggtttaattgactcacagttcagcacaactgggcaggcctcaggaaacttacaatcatggtagaaggtgaaggggaagcaaagcaccttcctcacaaggcgtcaggaagaagtgccaagcaaagggggaaaagccccttgtaaaactaccagaacctgtgagaactcaatcactatcacaagaacagcatgagggaaccgcccctcgtgattcaattacctccacctggtctctcccttgacacatggggattatgggtgttacaattcaagatgagatttgggtggggacacaaagcctaaccatatcaaggatcaagtggtgggttgaaactaacaggatgagatatatcagatacaaacacagggtcccatatttgggttaaaattcataaatgatcaaagcacaggatgacagataatataggtcattttagattattgtggccaacagatcacagtgggtagtgttatgacgaagggagggtcacagttactacagttacagatggattctgggtacaacatttgcactaaagtgcctttgccaagggaggcaacagtctcgacatcctgtggcctgatctacttcagggactgtgtcttgttcagagcatcacatttgaagagaactttgaccaaggggaatatgccagaaaaggaagttcgggatgctgaggatcttaggaactatgtctaaacaagattcattcacagaagtgggaatgtctatttggcaaaaagaaaatactacttacatggctgttggaagaccagcaatcacaaactcagtttttcaaaaggctgggcagaaacacagatgaaagaaacaggccatgtttaagaaaagataaaagctcacgcatgatatgccactagagaatcacctagcctcagtgttggcggggaggcctggggagtcttgatgtctgagagtgacattctgatgatcactgtcatgtgtaaatgttggcctaaagctgccaatatttttgatttaagagaagcaagaaatgcaaatttttatgcagcatgtctcaatttttaattttggcaactattacaaaatgtttaaagagactctgtgcagcccaaatataacatatctatgggctgatggcagcccagcgttgccagttcacagggtctacaagagatgattcttagtttcaacagggtgcagtgctgaaacgcgtgcacagtagattttgcttcggttatgaaagaacttccaaatatttatgattcatagccagagaaaaggctctctatccaggttctgaacaataggaaatcatcaagaggatattggatgacaatatatgaaagatgttatttgagaaaggattctctcctgaggcatagatgttgaaccaaattctattagttatgcttttacagcaagatagtggtttacagcttacaaaaggcttgtacatcctctcatattaaaagttattagaacagtcctttgaagtagaaaagtaggcatttctattttacaaacgagttggccgagtatctgagatagtagataactcatagaaggtcatccgggaaacggggcagcagaactgggatcgaatgactctggtcatccaactccaaatgcaaaagtctttctgctgctgcttcctagttaaactctaagggtctaagactccattcctagttatggtctcaactacatttgctcattgctgtgaggggtcaacccacctcccggagtcctctcctgcacattctcatgttcctgaaaggcttttctgtcccttccactactccctgtaagctcctgtgcttcacaatttcttgttgaattttttctaatctgactctatcagttatgggaatgttccctcaattcttagtgctccaaaccggacttgctcttggcttgtatttgtccaaaatatttgtcttctctatgttttctacatgtttgtcttataaggacaaaaacctgccttagtttatccatgaacaaagccacgcatgctagtggacacacacacacatgcgcgtgcgcgcgcacacacacacacacacacatacacacagagactttgtatgtgagtaatgaatcatcaaatcatcataatttctggacttgtattaataagtcggccaggaggaaaagaatctgctgtcaatcatggcttctggttctcacagtcatctctactttcttccagcaagtttggttctgtcaaaaaccagctgtcagccttgttcctgcatgcccaatgcagaagagtcagtaaagaagatttggttctctgtatttcaggggcatcaatgccaggttgaaatatgccattctggcccagctcagtggctcacacgtgtaatcccagcactttggaaggccaaagcgggtggattgcttgagctcaggagttcgagaccagcctgggcaagaggctgaggtgggaggatgacctgagcccgggaggtcaaggctgcagcgagctgtgatcgtgccactgcactcgagccagggcgttggagtgagaccctgtcaaaaaaaaaaaaaaaaaggaaggaaaaaaggaaggaaggaagggagggagggaagatgccattcttagattgaagtggactttatctgggcagaacacacacacacatacacacatgcacacacacattgtggagaaattgctgactaagcaaagcttccaaatgacttagtttggctaaaatgtaggcttttaaaaatgtgagcactgccaagggtttttccttgttgacccatggatccatcaagtgcaaacattttctaatgcactatatttaagcctgtgcagctagatgtcattcaacatgaaatacattattacaacttgcatctgtctaaaatcttgcatctaaaatgagagacaaaaaatctataaaaatggaaaacatgcatagaaatatgtgagggaggaaaaaattacccccaagaatgttagtgcacgcagtcacacagggagaagactatttttgttttgttttgattgttttgttttgttttggttgttttgttttggtgacctaactggtcaaatgacctattaagaatatttcatagaacgaatgttccgatgctctaatctctctagacaaggttcatatttgtatgggttacttattctctctttgttgactaagtcaataatcagaatcagcaggtttgcagtcagattggcagggataagcagcctagctcaggagaagtgagtataaaagccccaggctgggagcagccatcacagaagtccactcattcttggcaggatggcttctcatcgtctgctcctcctctgccttgctggactggtatttgtgtctgaggctggccctacggtgagtgtttctgtgacatcccattcctacatttaagattcacgctaaatgaagtagaagtgactccttccagctttgccaaccagcttttattactagggcaagggtacccagcatctatttttaatataattaattcaaacttcaaaaagaatgaagttccactgagcttactgagctgggacttgaactctgagcattctacctcattgctttggtgcattaggtttgtaatatctggtacctctgtttcctcagatagatgatagaaataaagatatgatattaaggaagctgttaatactgaattttcagaaaagtatccctccataaaatgtatttgggggacaaactgcaggagattatattctggccctatagttattcaaaacgtatttattgattaatctttaaaaggcttagtgaacaatattctagtcagatatctaattcttaaatcctctagaagaattaactaatactataaaatgggtctggatgtagttctgacattattttataacaactggtaagagggagtgactatagcaacaactaaaatgatctcaggaaaacctgtttggccctatgtatggtacattacatcttttcagtaattccactcaaatggagacttttaacaaagcaactgttctcaggggacctattttctcccttaaaattcattatacacatccctggttgatagcagtgtgtctggaggcagaaaccattcttgctttggaaacaattacgtctgtgttatactgagtagggaagctcattaattgtcgacacttacgttcctgataatgggatcagtgtgtaattcttgtttcgctccagatttctaataccacaaagaataaatcctttcactctgatcaattttgttaacttctcacgtgtcttctctacacccagggcaccggtgaatccaagtgtcctctgatggtcaaagttctagatgctgtccgaggcagtcctgccatcaatgtggccgtgcatgtgttcagaaaggctgctgatgacacctgggagccatttgcctctgggtaagttgccaaagaaccctcccacaggacttggttttatcttcccgtttgcccctcacttggtagagagaggctcacatcatctgctaaagaatttacaagtagattgaaaaacgtaggcagaggtcaagtatgccctctgaaggatgccctctttttgttttgcttagctaggaagtgaccaggaacctgagcatcatttaggggcagacagtagagaaaagaaggaatcagaactcctctcctctagctgtggtttgcaacccttttgggtcacagaacactttatgtaggtgatgaaaagtaaacattctatgcccagaaaaaatgcacagatacacacacatacaaaatcatatatgtgattttaggagtttcacagattccctggtgtccctgggtaacaccaaagctaagtgtccttgtcttagaattttaggaaaaggtataatgtgtattaacccattaacaaaaggaaaggaattcagaaatattattaaccaggcatctgtctgtagttaatatggatcacccaaaacccaaggcttttgcctaatgaacactttggggcacctactgtgtgcaaggctgggggctgtcaagctcagttaaaaaaaaaaagatagaagagatggatccatgaggcaaagtacagccccaggctaatcccacgatcacccgacttcatgtccaagagtggcttctcaccttcattagccagttcacaattttcatggagtttttctacctgcactagcaaaaacttcaaggaaaatacatattaataaatctaagcaaagtgaccagaagacagagcaatcaggagaccctttgcatccagcagaagaggaactgctaagtatttacatctccacagagaagaatttctgttgggttttaattgaaccccaagaaccacatgattcttcaaccattattgggaagatcattttcttaggtctggttttaactggctttttatttgggaattcatttatgtttatataaaatgccaagcataacatgaaaagtggttacaggactattctaagggagagacagaatggacaccaaaaatattccaatgttcttgtgaatcttttccttgcaccaggacaaaaaaaaaaagaagtgaaaagaagaaaggaggaggggcataatcagagtcagtaaagacaactgctatttttatctatcgtagctgttgcagtcaaatgggaagcaatttccaacattcaactatggagctggtacttacatggaaatagaagttgcctagtgtttgttgctggcaaagagttatcagagaggttaaatatataaaagggaaaagagtcagatacaggttcttcttcctactttaggttttccactgtgtgtgcaaatgatactccctggtggtgtgcagatgcctcaaagctatcctcacaccacaagggagaggagcgagatcctgctgtcctggagaagtgcagagttagaacagctgtggccacttgcatccaatcatcaatcttgaatcacagggactctttcttaagtaaacattatacctggccgggcacggtggctcacgcctgtaatcccagcactttgggatgccaaagtgggcatatcatctgaggtcaggagttcaagaccagcctggccaacatggcaaaactccgtctttatgaaaaatacaaaaattagccaggcatggtggcaggcgcctgtaatcccagctaattgggaggctgaggctggagaatcccttgaatctaggaggcagaggttgcagtgagctgagatcgtgccattgcactccagcctgggtgacaagagtaaaactctgtctcaaaaaaaaaaaattatacctacattctcttcttatcagagaaaaaaatctacagtgagcttttcaaaaagtttttacaaactttttgccatttaatttcagttaggagttttccctacttctgacttagttgaggggaaatgttcataacatgtttataacatgtttatgtgtgttagttggtgggggtgtattactttgccatgccatttgtttcctccatgcgtaacttaatccagactttcacaccttataggaaaaccagtgagtctggagagctgcatgggctcacaactgaggaggaatttgtagaagggatatacaaagtggaaatagacaccaaatcttactggaaggcacttggcatctccccattccatgagcatgcagaggtgagtatacagaccttcgagggttgttttggttttggtttttgcttttggcattccaggaaatgcacagttttactcagtgtaccacagaaatgtcctaaggaaggtgatgaatgaccaaaggttccctttcctattatacaagaaaaaattcacaacactctgagaagcaaatttctttttgactttgatgaaaatccacttagtaacatgacttgaacttacatgaaactactcatagtctattcattccactttatatgaatattgatgtatctgctgttgaaataatagtttatgaggcagccctccagaccccacgtagagtgtatgtaacaagagatgcaccattttatttctcgaaaacccgtaacattcttcattccaaaacacatctggcttctcggaggtctggacaagtgattcttggcaacacatacctatagagacaataaaatcaaagtaataatggcaacacaatagataacatttaccaagcatacaccatgtggcagacacaattataagtgttttccatatttaacctacttaatcctcaggaataagccactgaggtcagtcctattattatccccatcttatagatgaagaaaatgaggcaccaggaagtcaaataacttgtcaaaggtcacaagactaggaaatacacaagtagaaatgtttacaattaaggcccaggctgggtttgccctcagttctgctatgcctcgcattatgccccaggaaactttttcccttgtgaaagccaagcttaaaaaaagaaaagccacatttgtaacgtgctctgttcccctgcctatggtgaggatcttcaaacagttatacatggacccagtccccctgccttctccttaatttcttaagtcatttgaaacagatggctgtcatggaaatagaatccagacatgttggtcagagttaaagatcaactaattccatcaaaaatagctcggcatgaaagggaactattctctggcttagtcatggatgagactttcaattgctataaagtggttcctttattagacaatgttaccagggaaacaacaggggtttgtttgacttctggggcccacaagtcaacaagagagccccatctaccaaggagcatgtccctgactacccctcagccagcagcaagacatggaccccagtcagggcaggagcagggtttcggcggcgcccagcacaagacattgcccctagagtctcagcccctaccctcgagtaatagatctgcctacctgagactgttgtttgcccaagagctgggtctcagcctgatgggaaccatataaaaaggttcactgacatactgcccacatgttgttctctttcattagatcttagcttccttgtctgctcttcattcttgcagtattcattcaacaaacattaaaaaaaaaaaaaagcattctatgtgtggaacactctgctagatgctgtggatttagaaatgaaaatacatcccgacccttggaatggaagggaaaggactgaagtaagacagattaagcaggaccgtcagcccagcttgaagcccagataaatacggagaacaagagagagcgagtagtgagagatgagtcccaatgcctcactttggtgacgggtgcgtggtgggcttcatgcagcttcttctgataaatgcctccttcagaactggtcaactctaccttggccagtgacccaggtggtcatagtagatttaccaagggaaaatggaaacttttattaggagctcttaggcctcttcacttcatggatttttttttcctttttttttgagatggagttttgccctgtcacccaggctggaatgcagtggtgcaatctcagctcactgcaacctccgcctcccaggttcaagcaattctcctgcctcagcctcccgagtagctgggactacaggtgtgcgccaccacaccaggctaatttttgtattttttgtaaagacaggttttcaccacgttggccaggctggtctgaactccagacctcaggtgattcacctgtctcagcctcccaaagtgctgggattacaggtgtgagccaccgtgcccggctacttcatggatttttgattacagattatgcctcttacaatttttaagaagaatcaagtgggctgaaggtcaatgtcaccataagacaaaagacatttttattagttgattctagggaattggccttaaggggagccctttcttcctaagagattcttaggtgattctcacttcctcttgccccagtattatttttgtttttggtatggctcactcagatccttttttcctcctatccctaagtaatccgggtttctttttcccatatttagaacaaaatgtatttatgcagagtgtgtccaaacctcaacccaaggcctgtatacaaaataaatcaaattaaacacatctttactgtcttctacctctttcctgacctcaatatatcccaacttgcctcactctgagaaccaaggctgtcccagcacctgagtcgcagatattctactgatttgacagaactgtgtgactatctggaacagcattttgatccacaatttgcccagttacaaagcttaaatgagctctagtgcatgcatatatatttcaaaattccaccatgatcttccacactctgtattgtaaatagagccctgtaatgcttttacttcgtatttcattgcttgttatacataaaaatatacttttcttcttcatgttagaaaatgcaaagaataggagggtgggggaatctctgggcttggagacaggagacttgccttcctactatggttccatcagaatgtagactgggacaatacaataattcaagtctggtttgctcatctgtaaattgggaagaatgtttccagctccagaatgctaaatctctaagtctgtggttggcagccactattgcagcagctcttcaatgactcaatgcagttttgcattctccctaccttttttttctaaaaccaataaaatagatacagcctttaggctttctgggatttcccttagtcaagctagggtcatcctgactttcggcgtgaatttgcaaaacaagacctgactctgtactcctgctctaaggactgtgcatggttccaaaggcttagcttgccagcatatttgagctttttccttctgttcaaactgttccaaaatataaaagaataaaattaattaagttggcactggacttccggtggtcagtcatgtgtgtcatctgtcacgtttttcgggctctggtggaaatggatctgtctgtcttctctcataggtggtattcacagccaacgactccggcccccgccgctacaccattgccgccctgctgagcccctactcctattccaccacggctgtcgtcaccaatcccaaggaatgagggacttctcctccagtggacctgaaggacgagggatgggatttcatgtaaccaagagtattccatttttactaaagcagtgttttcacctcatatgctatgttagaagtccaggcagagacaataaaacattcctgtgaaaggcacttttcattccactttaacttgattttttaaattcccttattgtcccttccaaaaaaaagagaatcaaaattttacaaagaatcaaaggaattctagaaagtatctgggcagaacgctaggagagatccaaatttccattgtcttgcaagcaaagcacgtattaaatatgatctgcagccattaaaaagacacattctgtaaatgagagagccttattttcctgtaaccttcagcaaatagcaaaagacacattccaagggcccacttctttactgtgggcatttctttttttttctttttttcttttttccttttttgagacaaagtctcactctgttgcccaggctagaatgcagtggtgtaatctcagctcactgcaacctctgcttcctgggttcaagcgattctcctgcctcagcctcccaagtaactgggattacaggcgcatgccaccacgcctagctcatttttgtatttttagtagagatgggattttgccatgttggctaggctggtctacgaactcctgacctcaggtgatccacctgcctcagcctcccaaagtgctgggattacaggcatgagccactacacccggcccctactctgggcatttctttgattaaagagaaggggagctccaacaagatacacctgcagcaactcaggccgtctgatcagttcaggccagatctacactgcaaccagccaggtcaggggaaaaccaaagaaccccacacacccaatttacttaggctgatccaaaatccatgtatggagaactcacatgcaccaggcactattttaggtgaactgaatataaagaataggacccagtacctgcatttacttaaagaactcacaatcttttgagaacataactgtttcatcatggtttggcaggaggctatggtacaaggcacagcaagggtaagaaggaggaagaaaccaacaccctacagaaatcagggaatgactctgaataggtgtcacttaatctgagtgttggtaatttgtcagatagacaagggaaaaggtattctaggtagagagaatacagtttgcaaggcccagccaagtgaaacaatttgataagttgagagagcagacgacgattcagaatgttgaagggcaaaggtattgaggtgggatgggttatgctgctatcacaaataaccccaaatctcgggggcttaacaaagtaaaagtttagtctcagttgtgccaggtccaatgtagaactctttgctctagagactctttagggtggctttccttctaatggtgactgtttgagacagtttgatttagtcttgtggcttcaaggtcactctggtgatatttagccagcagactgagggaacatagtatggtattagacccctctgtgctgaagtgtcacacatgagtcccattgacttctcactggccagagctagttacatgcccccatctagatgtgctgagaaatgtggcccctggctgggagccatttcccagaacaactaactctatgctctggaagaggagcactaatctgagttggccaacaaccatctctaccacagtagggttgggactggtggggcatgaggctggagtgaaggttggttttatctgccacgcgttacagctgtgaatttgtcttgaaagcaacatgggtccattgaagggaaccttgacatcagtcatgtggctgggacaagaatagttaccacttgcccgtaatctccaaccaggattctccaggagaacctgagttagacacatggcttaggcctaaacctacctgagtggtctttctattttcctccaaattcaaatctcaaatcttgctaccctctaactggctatgttgagagaggaaaaaacttgaagagaatgcagtgtagctttggagtttttcacatgcacttttcccaagatacatagcaaaatcaatgtctccaattctattaatgttgttagcaagtccttgttccatgcatattggttaatccatagcaaattgccatttttatagactaaatggtcaaatattggcaatttcataaggttcagtctattacctaccatgattgtattggtcactaacctgcctatttttagaatgctacatattcatttggctgttgttaaatagctatggatttttataatcaaaacaggttgaaaatatgaatcagtttaaaaccacataca

SEQ ID NO: 467 - DNA, 20 bp, Homo sapiens
  source 1..20: mol_type = genomic DNA
gccatcctgccaagaatgag

SEQ ID NO: 468 - DNA, 20 bp, Homo sapiens
  source 1..20: mol_type = genomic DNA
gcaacttacccagaggcaaa

SEQ ID NO: 469 - DNA, 20 bp, Homo sapiens
  source 1..20: mol_type = genomic DNA
tataggaaaaccagtgagtc

SEQ ID NO: 470 - DNA, 20 bp, Homo sapiens
  source 1..20: mol_type = genomic DNA
tactcacctctgcatgctca

SEQ ID NO: 471 - DNA, 20 bp, Homo sapiens
  source 1..20: mol_type = genomic DNA
gccatcctgccaagaacgag

SEQ ID NO: 472 - RNA, 20 nt, Homo sapiens
  source 1..20: mol_type = genomic RNA
gccatcctgccaagaatgag

SEQ ID NO: 473 - RNA, 20 nt, synthetic construct
  source 1..20: mol_type = other RNA
gccatcctgccaagaacgag

SEQ ID NO: 474 - RNA, 20 nt, Homo sapiens
  source 1..20: mol_type = other RNA
gcaacttacccagaggcaaa

SEQ ID NO: 475 - RNA, 20 nt, Homo sapiens
  source 1..20: mol_type = other RNA
tataggaaaaccagtgagtc

SEQ ID NO: 476 - RNA, 20 nt, Homo sapiens
  source 1..20: mol_type = other RNA
tactcacctctgcatgctca

SEQ ID NO: 477 - RNA, 100 nt, synthetic construct
  source 1..100: mol_type = other RNA
gccatcctgccaagaatgaggttttagagctagaaatagcaagttaaaataaggctagtccgttatcaacttgaaaaagtggcaccgagtcggtgctttt

SEQ ID NO: 478 - RNA, 100 nt, synthetic construct; identical to SEQ ID NO: 477
  source 1..100: mol_type = other RNA

SEQ ID NO: 479 - RNA, 100 nt, synthetic construct
  source 1..100: mol_type = other RNA
tataggaaaaccagtgagtcgttttagagctagaaatagcaagttaaaataaggctagtccgttatcaacttgaaaaagtggcaccgagtcggtgctttt

SEQ ID NO: 480 - RNA, 100 nt, synthetic construct
  source 1..100: mol_type = other RNA
tactcacctctgcatgctcagttttagagctagaaatagcaagttaaaataaggctagtccgttatcaacttgaaaaagtggcaccgagtcggtgctttt

SEQ ID NO: 481 - RNA, 100 nt, synthetic construct
  source 1..100: mol_type = other RNA
actcacctctgcatgctcatgttttagagctagaaatagcaagttaaaataaggctagtccgttatcaacttgaaaaagtggcaccgagtcggtgctttt

SEQ ID NO: 482 - RNA, 100 nt, synthetic construct
  source 1..100: mol_type = other RNA
taccacctatgagagaagacgttttagagctagaaatagcaagttaaaataaggctagtccgttatcaacttgaaaaagtggcaccgagtcggtgctttt

SEQ ID NO: 483 - RNA, 109 nt, synthetic construct
  source 1..109: mol_type = other RNA
atactcacctctgcatgctcagttttagtactctgtaatgaaaattacagaatctactaaaacaaggcaaaatgccgtgtttatctcgtcaacttgttggcgagatttt

SEQ ID NO: 484 - RNA, 109 nt, synthetic construct
  source 1..109: mol_type = other RNA
actggttttcctataaggtgtgttttagtactctgtaatgaaaattacagaatctactaaaacaaggcaaaatgccgtgtttatctcgtcaacttgttggcgagatttt

SEQ ID NO: 485 - RNA, 119 nt, synthetic construct
  source 1..119: mol_type = other RNA
gttctgtcttttggtcaggacaaccgtctagctataagtgctgcagggtgtgagaaactcctattgctggacgatgtctcttacgaggcattagcacttggcaggatggcttctcatcg

SEQ ID NO: 486 - RNA, 119 nt, synthetic construct
  source 1..119: mol_type = other RNA
gttctgtcttttggtcaggacaaccgtctagctataagtgctgcagggtgtgagaaactcctattgctggacgatgtctcttacgaggcattagcactcctataaggtgtgaaagtctg

SEQ ID NO: 487 - RNA, 119 nt, synthetic construct
  source 1..119: mol_type = other RNA
gttctgtcttttggtcaggacaaccgtctagctataagtgctgcagggtgtgagaaactcctattgctggacgatgtctcttacgaggcattagcactgagcccatgcagctctccaga

SEQ ID NO: 488 - RNA, 119 nt, synthetic construct
  source 1..119: mol_type = other RNA
gttctgtcttttggtcaggacaaccgtctagctataagtgctgcagggtgtgagaaactcctattgctggacgatgtctcttacgaggcattagcacctcctcagttgtgagcccatgc

SEQ ID NO: 489 - RNA, 119 nt, synthetic construct
  source 1..119: mol_type = other RNA
gttctgtcttttggtcaggacaaccgtctagctataagtgctgcagggtgtgagaaactcctattgctggacgatgtctcttacgaggcattagcacgtagaagggatatacaaagtgg

SEQ ID NO: 490 - RNA, 119 nt, synthetic construct
  source 1..119: mol_type = other RNA
gttctgtcttttggtcaggacaaccgtctagctataagtgctgcagggtgtgagaaactcctattgctggacgatgtctcttacgaggcattagcacccactttgtatatcccttctac

SEQ ID NO: 491 - RNA, 119 nt, synthetic construct
  source 1..119: mol_type = other RNA
gttctgtcttttggtcaggacaaccgtctagctataagtgctgcagggtgtgagaaactcctattgctggacgatgtctcttacgaggcattagcacggtgtctatttccactttgtat

SEQ ID NO: 492 - RNA, 119 nt, synthetic construct
  source 1..119: mol_type = other RNA
gttctgtcttttggtcaggacaaccgtctagctataagtgctgcagggtgtgagaaactcctattgctggacgatgtctcttacgaggcattagcaccatgagcatgcagaggtgagta

SEQ ID NO: 493 - RNA, 100 nt, synthetic construct
  source 1..100: mol_type = other RNA
caacttacccagaggcaaatgttttagagctagaaatagcaagttaaaataaggctagtccgttatcaacttgaaaaagtggcaccgagtcggtgctttt

SEQ ID NO: 494 - RNA, 100 nt, synthetic construct
  source 1..100: mol_type = other RNA
aatggctcccaggtgtcatcgttttagagctagaaatagcaagttaaaataaggctagtccgttatcaacttgaaaaagtggcaccgagtcggtgctttt

SEQ ID NO: 495 - RNA, 100 nt, synthetic construct
  source 1..100: mol_type = other RNA
ggctcccaggtgtcatcagcgttttagagctagaaatagcaagttaaaataaggctagtccgttatcaacttgaaaaagtggcaccgagtcggtgctttt

SEQ ID NO: 496 - RNA, 100 nt, synthetic construct
  source 1..100: mol_type = other RNA
ctctcataggtggtattcacgttttagagctagaaatagcaagttaaaataaggctagtccgttatcaacttgaaaaagtggcaccgagtcggtgctttt

SEQ ID NO: 497 - RNA, 100 nt, synthetic construct; identical to SEQ ID NO: 479
  source 1..100: mol_type = other RNA

SEQ ID NO: 498 - skipped

SEQ ID NO: 499 - RNA, 100 nt, synthetic construct
  source 1..100: mol_type = other RNA
gcaacttacccagaggcaaagttttagagctagaaatagcaagttaaaataaggctagtccgttatcaacttgaaaaagtggcaccgagtcggtgctttt

SEQ ID NO: 500 - RNA, 100 nt, synthetic construct
  source 1..100: mol_type = other RNA
tctgtatactcacctctgcagttttagagctagaaatagcaagttaaaataaggctagtccgttatcaacttgaaaaagtggcaccgagtcggtgctttt

SEQ ID NO: 501 - RNA, 100 nt, synthetic construct
  source 1..100: mol_type = other RNA
gaaacactcaccgtagggccgttttagagctagaaatagcaagttaaaataaggctagtccgttatcaacttgaaaaagtggcaccgagtcggtgctttt

SEQ ID NO: 502 - RNA, 100 nt, synthetic construct
  source 1..100: mol_type = other RNA
ctctacacccagggcaccgggttttagagctagaaatagcaagttaaaataaggctagtccgttatcaacttgaaaaagtggcaccgagtcggtgctttt

SEQ ID NO: 503 - RNA, 100 nt, synthetic construct
  source 1..100: mol_type = other RNA
acaccttataggaaaaccaggttttagagctagaaatagcaagttaaaataaggctagtccgttatcaacttgaaaaagtggcaccgagtcggtgctttt

SEQ ID NO: 504 - RNA, 100 nt, synthetic construct
  source 1..100: mol_type = other RNA
ataggaaaaccagtgagtctgttttagagctagaaatagcaagttaaaataaggctagtccgttatcaacttgaaaaagtggcaccgagtcggtgctttt

SEQ ID NO: 505 - skipped

SEQ ID NO: 506 - RNA, 100 nt, synthetic construct
  source 1..100: mol_type = other RNA
ctcaccgtagggccagcctcgttttagagctagaaatagcaagttaaaataaggctagtccgttatcaacttgaaaaagtggcaccgagtcggtgctttt

SEQ ID NO: 507 - RNA, 100 nt, synthetic construct
  source 1..100: mol_type = other RNA
aacctgctgattctgattatgttttagagctagaaatagcaagttaaaataaggctagtccgttatcaacttgaaaaagtggcaccgagtcggtgctttt

SEQ ID NO: 508 - RNA, 109 nt, synthetic construct
  source 1..109: mol_type = other RNA
aagagagaataagtaacccatgttttagtactctgtaatgaaaattacagaatctactaaaacaaggcaaaatgccgtgtttatctcgtcaacttgttggcgagatttt

SEQ ID NO: 509 - RNA, 109 nt, synthetic construct
  source 1..109: mol_type = other RNA
aagcagcctagctcaggagaagttttagtactctgtaatgaaaattacagaatctactaaaacaaggcaaaatgccgtgtttatctcgtcaacttgttggcgagatttt

SEQ ID NO: 510 - RNA, 100 nt, synthetic construct
  source 1..100: mol_type = other RNA
aagtccactcattcttggcagttttagagctagaaatagcaagttaaaataaggctagtccgttatcaacttgaaaaagtggcaccgagtcggtgctttt

SEQ ID NO: 511 - RNA, 109 nt, synthetic construct
  source 1..109: mol_type = other RNA
acgatgagaagccatcctgccgttttagtactctgtaatgaaaattacagaatctactaaaacaaggcaaaatgccgtgtttatctcgtcaacttgttggcgagatttt

SEQ ID NO: 512 - RNA, 100 nt, synthetic construct
  source 1..100: mol_type = other RNA
agacaaggttcatatttgtagttttagagctagaaatagcaagttaaaataaggctagtccgttatcaacttgaaaaagtggcaccgagtcggtgctttt

SEQ ID NO: 513 - RNA, 100 nt, synthetic construct
  source 1..100: mol_type = other RNA
aggctgggagcagccatcacgttttagagctagaaatagcaagttaaaataaggctagtccgttatcaacttgaaaaagtggcaccgagtcggtgctttt

SEQ ID NO: 514 - RNA, 100 nt, synthetic construct
  source 1..100: mol_type = other RNA
ataagtaacccatacaaatagttttagagctagaaatagcaagttaaaataaggctagtccgttatcaacttgaaaaagtggcaccgagtcggtgctttt

SEQ ID NO: 515 - RNA, 100 nt, synthetic construct
  source 1..100: mol_type = other RNA
atactcacttctcctgagctgttttagagctagaaatagcaagttaaaataaggctagtccgttatcaacttgaaaaagtggcaccgagtcggtgctttt

SEQ ID NO: 516 - RNA, 100 nt, synthetic construct
  source 1..100: mol_type = other RNA
attattgacttagtcaacaagttttagagctagaaatagcaagttaaaataaggctagtccgttatcaacttgaaaaagtggcaccgagtcggtgctttt

SEQ ID NO: 517 - RNA, 100 nt, synthetic construct
  source 1..100: mol_type = other RNA
caaatatgaaccttgtctaggttttagagctagaaatagcaagttaaaataaggctagtccgttatcaacttgaaaaagtggcaccgagtcggtgctttt

SEQ ID NO: 518 - RNA, 109 nt, synthetic construct
  source 1..109: mol_type = other RNA
cagaagtccactcattcttgggttttagtactctgtaatgaaaattacagaatctactaaaacaaggcaaaatgccgtgtttatctcgtcaacttgttggcgagatttt

SEQ ID NO: 519 - RNA, 109 nt, synthetic construct
  source 1..109: mol_type = other RNA
caggctgggagcagccatcacgttttagtactctgtaatgaaaattacagaatctactaaaacaaggcaaaatgccgtgtttatctcgtcaacttgttggcgagatttt

SEQ ID NO: 520 - RNA, 100 nt, synthetic construct
  source 1..100: mol_type = other RNA
ccatcctgccaagaatgagtgttttagagctagaaatagcaagttaaaataaggctagtccgttatcaacttgaaaaagtggcaccgagtcggtgctttt

SEQ ID NO: 521 - RNA, 109 nt, synthetic construct
  source 1..109: mol_type = other RNA
cctgctgattctgattattgagttttagtactctgtaatgaaaattacagaatctactaaaacaaggcaaaatgccgtgtttatctcgtcaacttgttggcgagatttt

SEQ ID NO: 522 - RNA, 109 nt, synthetic construct
  source 1..109: mol_type = other RNA
cgatgctctaatctctctagagttttagtactctgtaatgaaaattacagaatctactaaaacaaggcaaaatgccgtgtttatctcgtcaacttgttggcgagatttt

SEQ ID NO: 523 - RNA, 109 nt, synthetic construct
  source 1..109: mol_type = other RNA
ctaagtcaataatcagaatcagttttagtactctgtaatgaaaattacagaatctactaaaacaaggcaaaatgccgtgtttatctcgtcaacttgttggcgagatttt

SEQ ID NO: 524 - RNA, 109 nt, synthetic construct
  source 1..109: mol_type = other RNA
ctagacaaggttcatatttgtgttttagtactctgtaatgaaaattacagaatctactaaaacaaggcaaaatgccgtgtttatctcgtcaacttgttggcgagatttt

SEQ ID NO: 525 - RNA, 100 nt, synthetic construct
  source 1..100: mol_type = other RNA
gaaccttgtctagagagattgttttagagctagaaatagcaagttaaaataaggctagtccgttatcaacttgaaaaagtggcaccgagtcggtgctttt

SEQ ID NO: 526 - RNA, 100 nt, synthetic construct
  source 1..100: mol_type = other RNA
gaagtccactcattcttggcgttttagagctagaaatagcaagttaaaataaggctagtccgttatcaacttgaaaaagtggcaccgagtcggtgctttt

SEQ ID NO: 527 - RNA, 100 nt, synthetic construct
  source 1..100: mol_type = other RNA
gaatcagcaggtttgcagtcgttttagagctagaaatagcaagttaaaataaggctagtccgttatcaacttgaaaaagtggcaccgagtcggtgctttt

SEQ ID NO: 528 - RNA, 100 nt, synthetic construct
  source 1..100: mol_type = other RNA
gaatgagtggacttctgtgagttttagagctagaaatagcaagttaaaataaggctagtccgttatcaacttgaaaaagtggcaccgagtcggtgctttt

SEQ ID NO: 529 - RNA, 100 nt, synthetic construct
  source 1..100: mol_type = other RNA
gactgcaaacctgctgattcgttttagagctagaaatagcaagttaaaataaggctagtccgttatcaacttgaaaaagtggcaccgagtcggtgctttt

SEQ ID NO: 530 - RNA, 109 nt, synthetic construct
  source 1..109: mol_type = other RNA
gacttagtcaacaaagagagagttttagtactctgtaatgaaaattacagaatctactaaaacaaggcaaaatgccgtgtttatctcgtcaacttgttggcgagatttt

SEQ ID NO: 531 - RNA, 100 nt, synthetic construct
  source 1..100: mol_type = other RNA
gataagcagcctagctcagggttttagagctagaaatagcaagttaaaataaggctagtccgttatcaacttgaaaaagtggcaccgagtcggtgctttt

SEQ ID NO: 532 - RNA, 100 nt, synthetic construct
  source 1..100: mol_type = other RNA
gatgagaagccatcctgccagttttagagctagaaatagcaagttaaaataaggctagtccgttatcaacttgaaaaagtggcaccgagtcggtgctttt

SEQ ID NO: 533 - skipped

SEQ ID NO: 534 - RNA, 100 nt, synthetic construct
  source 1..100: mol_type = other RNA
gcttttatactcacttctccgttttagagctagaaatagcaagttaaaataaggctagtccgttatcaacttgaaaaagtggcaccgagtcggtgctttt

SEQ ID NO: 535 - RNA, 109 nt, synthetic construct
  source 1..109: mol_type = other RNA
ggataagcagcctagctcagggttttagtactctgtaatgaaaattacagaatctactaaaacaaggcaaaatgccgtgtttatctcgtcaacttgttggcgagatttt

SEQ ID NO: 536 - RNA, 100 nt, synthetic construct
  source 1..100: mol_type = other RNA
gtctagagagattagagcatgttttagagctagaaatagcaagttaaaataaggctagtccgttatcaacttgaaaaagtggcaccgagtcggtgctttt

SEQ ID NO: 537 - RNA, 100 nt, synthetic construct
  source 1..100: mol_type = other RNA
gtgatggctgctcccagcctgttttagagctagaaatagcaagttaaaataaggctagtccgttatcaacttgaaaaagtggcaccgagtcggtgctttt

SEQ ID NO: 538 - RNA, 109 nt, synthetic construct
  source 1..109: mol_type = other RNA
tacttattctctctttgttgagttttagtactctgtaatgaaaattacagaatctactaaaacaaggcaaaatgccgtgtttatctcgtcaacttgttggcgagatttt

SEQ ID NO: 539 - RNA, 109 nt, synthetic construct
  source 1..109: mol_type = other RNA
tattctctctttgttgactaagttttagtactctgtaatgaaaattacagaatctactaaaacaaggcaaaatgccgtgtttatctcgtcaacttgttggcgagatttt

SEQ ID NO: 540 - RNA, 100 nt, synthetic construct
  source 1..100: mol_type = other RNA
tattgacttagtcaacaaaggttttagagctagaaatagcaagttaaaataaggctagtccgttatcaacttgaaaaagtggcaccgagtcggtgctttt

SEQ ID NO: 541 - RNA, 109 nt, synthetic construct
  source 1..109: mol_type = other RNA
tattgacttagtcaacaaagagttttagtactctgtaatgaaaattacagaatctactaaaacaaggcaaaatgccgtgtttatctcgtcaacttgttggcgagatttt

SEQ ID NO: 542 - RNA, 109 nt, synthetic construct
  source 1..109: mol_type = other RNA
tcagaatcagcaggtttgcaggttttagtactctgtaatgaaaattacagaatctactaaaacaaggcaaaatgccgtgtttatctcgtcaacttgttggcgagatttt

SEQ ID NO: 543 - RNA, 100 nt, synthetic construct
  source 1..100: mol_type = other RNA
tccactcattcttggcaggagttttagagctagaaatagcaagttaaaataaggctagtccgttatcaacttgaaaaagtggcaccgagtcggtgctttt

SEQ ID NO: 544 - RNA, 109 nt, synthetic construct
  source 1..109: mol_type = other RNA
tctctctttgttgactaagtcgttttagtactctgtaatgaaaattacagaatctactaaaacaaggcaaaatgccgtgtttatctcgtcaacttgttggcgagatttt

SEQ ID NO: 545 - RNA, 109 nt, synthetic construct
  source 1..109: mol_type = other RNA
tgagaagccatcctgccaagagttttagtactctgtaatgaaaattacagaatctactaaaacaaggcaaaatgccgtgtttatctcgtcaacttgttggcgagatttt

SEQ ID NO: 546 - RNA, 109 nt, synthetic construct
  source 1..109: mol_type = other RNA
tgagctaggctgcttatccctgttttagtactctgtaatgaaaattacagaatctactaaaacaaggcaaaatgccgtgtttatctcgtcaacttgttggcgagatttt

SEQ ID NO: 547 - RNA, 100 nt, synthetic construct
  source 1..100: mol_type = other RNA
tgagtataaaagccccaggcgttttagagctagaaatagcaagttaaaataaggctagtccgttatcaacttgaaaaagtggcaccgagtcggtgctttt

SEQ ID NO: 548 - RNA, 100 nt, synthetic construct
  source 1..100: mol_type = other RNA
tgatggctgctcccagcctggttttagagctagaaatagcaagttaaaataaggctagtccgttatcaacttgaaaaagtggcaccgagtcggtgctttt

SEQ ID NO: 549 - RNA, 109 nt, synthetic construct
  source 1..109: mol_type = other RNA
tgccaagaatgagtggacttcgttttagtactctgtaatgaaaattacagaatctactaaaacaaggcaaaatgccgtgtttatctcgtcaacttgttggcgagatttt

SEQ ID NO: 550 - RNA, 109 nt, synthetic construct
  source 1..109: mol_type = other RNA
tgccaatctgactgcaaacctgttttagtactctgtaatgaaaattacagaatctactaaaacaaggcaaaatgccgtgtttatctcgtcaacttgttggcgagatttt

SEQ ID NO: 551 - RNA, 100 nt, synthetic construct
  source 1..100: mol_type = other RNA
tgttgactaagtcaataatcgttttagagctagaaatagcaagttaaaataaggctagtccgttatcaacttgaaaaagtggcaccgagtcggtgctttt

SEQ ID NO: 552 - RNA, 100 nt, synthetic construct
  source 1..100: mol_type = other RNA
ttgacttagtcaacaaagaggttttagagctagaaatagcaagttaaaataaggctagtccgttatcaacttgaaaaagtggcaccgagtcggtgctttt

SEQ ID NO: 553 - RNA, 109 nt, synthetic construct
  source 1..109: mol_type = other RNA
tttgttgactaagtcaataatgttttagtactctgtaatgaaaattacagaatctactaaaacaaggcaaaatgccgtgtttatctcgtcaacttgttggcgagatttt

SEQ ID NO: 554 - RNA, 100 nt, synthetic construct
  source 1..100: mol_type = other RNA
aaaagccccaggctgggagcgttttagagctagaaatagcaagttaaaataaggctagtccgttatcaacttgaaaaagtggcaccgagtcggtgctttt

SEQ ID NO: 555 - RNA, 100 nt, synthetic construct
  source 1..100: mol_type = other RNA
aagtgagtataaaagccccagttttagagctagaaatagcaagttaaaataaggctagtccgttatcaacttgaaaaagtggcaccgagtcggtgctttt

SEQ ID NO: 556 - RNA, 109 nt, synthetic construct
  source 1..109: mol_type = other RNA
aataatcagaatcagcaggttgttttagtactctgtaatgaaaattacagaatctactaaaacaaggcaaaatgccgtgtttatctcgtcaacttgttggcgagatttt

SEQ ID NO: 557 - RNA, 100 nt, synthetic construct
  source 1..100: mol_type = other RNA
aatatgaaccttgtctagaggttttagagctagaaatagcaagttaaaataaggctagtccgttatcaacttgaaaaagtggcaccgagtcggtgctttt

SEQ ID NO: 558 - RNA, 100 nt, synthetic construct
  source 1..100: mol_type = other RNA
aatgagtggacttctgtgatgttttagagctagaaatagcaagttaaaataaggctagtccgttatcaacttgaaaaagtggcaccgagtcggtgctttt

SEQ ID NO: 559 - RNA, 109 nt, synthetic construct
  source 1..109: mol_type = other RNA
acaaatatgaaccttgtctaggttttagtactctgtaatgaaaattacagaatctactaaaacaaggcaaaatgccgtgtttatctcgtcaacttgttggcgagatttt

SEQ ID NO: 560 - RNA, 100 nt, synthetic construct
  source 1..100: mol_type = other RNA
acagaagtccactcattcttgttttagagctagaaatagcaagttaaaataaggctagtccgttatcaacttgaaaaagtggcaccgagtcggtgctttt

SEQ ID NO: 561 - RNA, 100 nt, synthetic construct
  source 1..100: mol_type = other RNA
accttgtctagagagattaggttttagagctagaaatagcaagttaaaataaggctagtccgttatcaacttgaaaaagtggcaccgagtcggtgctttt

SEQ ID NO: 562 - RNA, 100 nt, synthetic construct
  source 1..100: mol_type = other RNA
agaagccatcctgccaagaagttttagagctagaaatagcaagttaaaataaggctagtccgttatcaacttgaaaaagtggcaccgagtcggtgctttt

SEQ ID NO: 563 - RNA, 100 nt, synthetic construct
  source 1..100: mol_type = other RNA
agcaggtttgcagtcagattgttttagagctagaaatagcaagttaaaataaggctagtccgttatcaacttgaaaaagtggcaccgagtcggtgctttt

SEQ ID NO: 564 - RNA, 100 nt, synthetic construct
  source 1..100: mol_type = other RNA
agggataagcagcctagctcgttttagagctagaaatagcaagttaaaataaggctagtccgttatcaacttgaaaaagtggcaccgagtcggtgctttt

SEQ ID NO: 565 - RNA, 100 nt, synthetic construct
  source 1..100: mol_type = other RNA
aggtttgcagtcagattggcgttttagagctagaaatagcaagttaaaataaggctagtccgttatcaacttgaaaaagtggcaccgagtcggtgctttt

SEQ ID NO: 566 - RNA, 100 nt, synthetic construct
  source 1..100: mol_type = other RNA
agtataaaagccccaggctggttttagagctagaaatagcaagttaaaataaggctagtccgttatcaacttgaaaaagtggcaccgagtcggtgctttt

SEQ ID NO: 567 - RNA, 100 nt, synthetic construct
  source 1..100: mol_type = other RNA
agtcaataatcagaatcagcgttttagagctagaaatagcaagttaaaataaggctagtccgttatcaacttgaaaaagtggcaccgagtcggtgctttt

SEQ ID NO: 568 - RNA, 100 nt, synthetic construct
  source 1..100: mol_type = other RNA
ataatcagaatcagcaggttgttttagagctagaaatagcaagttaaaataaggctagtccgttatcaacttgaaaaagtggcaccgagtcggtgctttt

SEQ ID NO: 569 - RNA, 119 nt, synthetic construct
  source 1..119: mol_type = other RNA
gttctgtcttttggtcaggacaaccgtctagctataagtgctgcagggtgtgagaaactcctattgctggacgatgtctcttacgaggcattagcacttgacttagtcaacaaagagag

SEQ ID NO: 570 - RNA, 119 nt, synthetic construct
  source 1..119: mol_type = other RNA
gttctgtcttttggtcaggacaaccgtctagctataagtgctgcagggtgtgagaaactcctattgctggacgatgtctcttacgaggcattagcactctctttgttgactaagtcaat

SEQ ID NO: 571 - RNA, 119 nt, synthetic construct
  source 1..119: mol_type = other RNA
gttctgtcttttggtcaggacaaccgtctagctataagtgctgcagggtgtgagaaactcctattgctggacgatgtctcttacgaggcattagcactgattattgacttagtcaacaa

SEQ ID NO: 572 - skipped

SEQ ID NO: 573 - RNA, 119 nt, synthetic construct
  source 1..119: mol_type = other RNA
gttctgtcttttggtcaggacaaccgtctagctataagtgctgcagggtgtgagaaactcctattgctggacgatgtctcttacgaggcattagcacacttagtcaacaaagagagaat

SEQ ID NO: 574 - RNA, 119 nt, synthetic construct
  source 1..119: mol_type = other RNA
gttctgtcttttggtcaggacaaccgtctagctataagtgctgcagggtgtgagaaactcctattgctggacgatgtctcttacgaggcattagcacgcagggataagcagcctagctc

SEQ ID NO: 575 - RNA, 119 nt, synthetic construct
  source 1..119: mol_type = other RNA
gttctgtcttttggtcaggacaaccgtctagctataagtgctgcagggtgtgagaaactcctattgctggacgatgtctcttacgaggcattagcacgtatgggttacttattctctct

SEQ ID NO: 576 - RNA, 100 nt, synthetic construct
  source 1..100: mol_type = other RNA
caagaatgagtggacttctggttttagagctagaaatagcaagttaaaataaggctagtccgttatcaacttgaaaaagtggcaccgagtcggtgctttt

SEQ ID NO: 577 - RNA, 100 nt, synthetic construct
  source 1..100: mol_type = other RNA
caatctgactgcaaacctgcgttttagagctagaaatagcaagttaaaataaggctagtccgttatcaacttgaaaaagtggcaccgagtcggtgctttt

SEQ ID NO: 578 - RNA, 100 nt, synthetic construct
  source 1..100: mol_type = other RNA
cacagaagtccactcattctgttttagagctagaaatagcaagttaaaataaggctagtccgttatcaacttgaaaaagtggcaccgagtcggtgctttt

SEQ ID NO: 579 - RNA, 100 nt, synthetic construct
  source 1..100: mol_type = other RNA
cagacgatgagaagccatccgttttagagctagaaatagcaagttaaaataaggctagtccgttatcaacttgaaaaagtggcaccgagtcggtgctttt

SEQ ID NO: 580 - RNA, 100 nt, synthetic construct
  source 1..100: mol_type = other RNA
cagcaggtttgcagtcagatgttttagagctagaaatagcaagttaaaataaggctagtccgttatcaacttgaaaaagtggcaccgagtcggtgctttt

SEQ ID NO: 581 - RNA, 100 nt, synthetic construct
  source 1..100: mol_type = other RNA
caggatggcttctcatcgtcgttttagagctagaaatagcaagttaaaataaggctagtccgttatcaacttgaaaaagtggcaccgagtcggtgctttt

SEQ ID NO: 582 - RNA, 109 nt, synthetic construct
  source 1..109: mol_type = other RNA
caggtttgcagtcagattggcgttttagtactctgtaatgaaaattacagaatctactaaaacaaggcaaaatgccgtgtttatctcgtcaacttgttggcgagatttt

SEQ ID NO: 583 - RNA, 100 nt, synthetic construct
  source 1..100: mol_type = other RNA
cagtcagattggcagggatagttttagagctagaaatagcaagttaaaataaggctagtccgttatcaacttgaaaaagtggcaccgagtcggtgctttt

SEQ ID NO: 584 - RNA, 100 nt, synthetic construct
  source 1..100: mol_type = other RNA
ccactcattcttggcaggatgttttagagctagaaatagcaagttaaaataaggctagtccgttatcaacttgaaaaagtggcaccgagtcggtgctttt

SEQ ID NO: 585 - RNA, 100 nt, synthetic construct
  source 1..100: mol_type = other RNA
ctaagtcaataatcagaatcgttttagagctagaaatagcaagttaaaataaggctagtccgttatcaacttgaaaaagtggcaccgagtcggtgctttt

SEQ ID NO: 586 - RNA, 119 nt, synthetic construct
  source 1..119: mol_type = other RNA
gttctgtcttttggtcaggacaaccgtctagctataagtgctgcagggtgtgagaaactcctattgctggacgatgtctcttacgaggcattagcacgtcaacaaagagagaataagta

SEQ ID NO: 587 - RNA, 100 nt, synthetic construct
  source 1..100: mol_type = other RNA
cttatccctgccaatctgacgttttagagctagaaatagcaagttaaaataaggctagtccgttatcaacttgaaaaagtggcaccgagtcggtgctttt

SEQ ID NO: 588 - RNA, 119 nt, synthetic construct
  source 1..119: mol_type = other RNA
gttctgtcttttggtcaggacaaccgtctagctataagtgctgcagggtgtgagaaactcctattgctggacgatgtctcttacgaggcattagcactccctgccaatctgactgcaaa

SEQ ID NO: 589 - RNA, 119 nt, synthetic construct
  source 1..119: mol_type = other RNA
gttctgtcttttggtcaggacaaccgtctagctataagtgctgcagggtgtgagaaactcctattgctggacgatgtctcttacgaggcattagcacttctctctttgttgactaagtc

SEQ ID NO: 590 - RNA, 119 nt, synthetic construct
  source 1..119: mol_type = other RNA
gttctgtcttttggtcaggacaaccgtctagctataagtgctgcagggtgtgagaaactcctattgctggacgatgtctcttacgaggcattagcactcctgagctaggctgcttatcc

SEQ ID NO: 591 - RNA, 100 nt, synthetic construct
  source 1..100: mol_type = other RNA
cttctgtgatggctgctcccgttttagagctagaaatagcaagttaaaataaggctagtccgttatcaacttgaaaaagtggcaccgagtcggtgctttt

SEQ ID NO: 592 - RNA, 119 nt, synthetic construct
  source 1..119: mol_type = other RNA
gttctgtcttttggtcaggacaaccgtctagctataagtgctgcagggtgtgagaaactcctattgctggacgatgtctcttacgaggcattagcactgtgatggctgctcccagcctg

SEQ ID NO: 593 - RNA, 119 nt, synthetic construct
  source 1..119: mol_type = other RNA
gttctgtcttttggtcaggacaaccgtctagctataagtgctgcagggtgtgagaaactcctattgctggacgatgtctcttacgaggcattagcacgcaggatggcttctcatcgtct

SEQ ID NO: 594 - RNA, 119 nt, synthetic construct
  source 1..119: mol_type = other RNA
gttctgtcttttggtcaggacaaccgtctagctataagtgctgcagggtgtgagaaactcctattgctggacgatgtctcttacgaggcattagcactctagagagattagagcatcgg

SEQ ID NO: 595 - RNA, 119 nt, synthetic construct
  source 1..119: mol_type = other RNA
gttctgtcttttggtcaggacaaccgtctagctataagtgctgcagggtgtgagaaactcctattgctggacgatgtctcttacgaggcattagcacgttgactaagtcaataatcaga

SEQ ID NO: 596 - RNA, 119 nt, synthetic construct
  source 1..119: mol_type = other RNA
gttctgtcttttggtcaggacaaccgtctagctataagtgctgcagggtgtgagaaactcctattgctggacgatgtctcttacgaggcattagcactatactcacttctcctgagcta

SEQ ID NO: 597 - RNA, 100 nt, synthetic construct
  source 1..100: mol_type = other RNA
gaagtgagtataaaagccccgttttagagctagaaatagcaagttaaaataaggctagtccgttatcaacttgaaaaagtggcaccgagtcggtgctttt

SEQ ID NO: 598 - RNA, 100 nt, synthetic construct
  source 1..100: mol_type = other RNA
gacaaggttcatatttgtatgttttagagctagaaatagcaagttaaaataaggctagtccgttatcaacttgaaaaagtggcaccgagtcggtgctttt

SEQ ID NO: 599 - RNA, 100 nt, synthetic construct
  source 1..100: mol_type = other RNA
gagtataaaagccccaggctgttttagagctagaaatagcaagttaaaataaggctagtccgttatcaacttgaaaaagtggcaccgagtcggtgctttt

SEQ ID NO: 600 - RNA, 100 nt, synthetic construct
  source 1..100: mol_type = other RNA
gagtggacttctgtgatggcgttttagagctagaaatagcaagttaaaataaggctagtccgttatcaacttgaaaaagtggcaccgagtcggtgctttt

SEQ ID NO: 601 - RNA, 100 nt, synthetic construct
  source 1..100: mol_type = other RNA
gatggctgctcccagcctgggttttagagctagaaatagcaagttaaaataaggctagtccgttatcaacttgaaaaagtggcaccgagtcggtgctttt

SEQ ID NO: 602 - RNA, 100 nt, synthetic construct
  source 1..100: mol_type = other RNA
gcagcctagctcaggagaaggttttagagctagaaatagcaagttaaaataaggctagtccgttatcaacttgaaaaagtggcaccgagtcggtgctttt

SEQ ID NO: 603 - RNA, 100 nt, synthetic construct
  source 1..100: mol_type = other RNA
gctgcttatccctgccaatcgttttagagctagaaatagcaagttaaaataaggctagtccgttatcaacttgaaaaagtggcaccgagtcggtgctttt

SEQ ID NO: 604 - RNA, 100 nt, synthetic construct
  source 1..100: mol_type = other RNA
gggataagcagcctagctcagttttagagctagaaatagcaagttaaaataaggctagtccgttatcaacttgaaaaagtggcaccgagtcggtgctttt

SEQ ID NO: 605 - RNA, 100 nt, synthetic construct
  source 1..100: mol_type = other RNA
ggtttgcagtcagattggcagttttagagctagaaatagcaagttaaaataaggctagtccgttatcaacttgaaaaagtggcaccgagtcggtgctttt

SEQ ID NO: 606 - RNA, 100 nt, synthetic construct
  source 1..100: mol_type = other RNA
gttacttattctctctttgtgttttagagctagaaatagcaagttaaaataaggctagtccgttatcaacttgaaaaagtggcaccgagtcggtgctttt

SEQ ID NO: 607 - RNA, 119 nt, synthetic construct
  source 1..119: mol_type = other RNA
gttctgtcttttggtcaggacaaccgtctagctataagtgctgcagggtgtgagaaactcctattgctggacgatgtctcttacgaggcattagcaccttattctctctttgttgacta

SEQ ID NO: 608 - RNA, 119 nt, synthetic construct
  source 1..119: mol_type = other RNA
gttctgtcttttggtcaggacaaccgtctagctataagtgctgcagggtgtgagaaactcctattgctggacgatgtctcttacgaggcattagcacatatttgtatgggttacttatt

SEQ ID NO: 609 - RNA, 119 nt, synthetic construct
  source 1..119: mol_type = other RNA
gttctgtcttttggtcaggacaaccgtctagctataagtgctgcagggtgtgagaaactcctattgctggacgatgtctcttacgaggcattagcacactaagtcaataatcagaatca

SEQ ID NO: 610 - RNA, 100 nt, synthetic construct
  source 1..100: mol_type = other RNA
gtttgcagtcagattggcaggttttagagctagaaatagcaagttaaaataaggctagtccgttatcaacttgaaaaagtggcaccgagtcggtgctttt

SEQ ID NO: 611 - RNA, 119 nt, synthetic construct
  source 1..119: mol_type = other RNA
gttctgtcttttggtcaggacaaccgtctagctataagtgctgcagggtgtgagaaactcctattgctggacgatgtctcttacgaggcattagcacgcagtcagattggcagggataa

SEQ ID NO: 612 - RNA, 100 nt, synthetic construct
  source 1..100: mol_type = other RNA
tacaaatatgaaccttgtctgttttagagctagaaatagcaagttaaaataaggctagtccgttatcaacttgaaaaagtggcaccgagtcggtgctttt

SEQ ID NO: 613 - RNA, 100 nt, synthetic construct
  source 1..100: mol_type = other RNA
tactcacttctcctgagctagttttagagctagaaatagcaagttaaaataaggctagtccgttatcaacttgaaaaagtggcaccgagtcggtgctttt

SEQ ID NO: 614 - RNA, 100 nt, synthetic construct
  source 1..100: mol_type = other RNA
tataaaagccccaggctggggttttagagctagaaatagcaagttaaaataaggctagtccgttatcaacttgaaaaagtggcaccgagtcggtgctttt

SEQ ID NO: 615 - RNA, 100 nt, synthetic construct
  source 1..100: mol_type = other RNA
tcacttctcctgagctaggcgttttagagctagaaatagcaagttaaaataaggctagtccgttatcaacttgaaaaagtggcaccgagtcggtgctttt

SEQ ID NO: 616 - RNA, 100 nt, synthetic construct
  source 1..100: mol_type = other RNA
tcagattggcagggataagcgttttagagctagaaatagcaagttaaaataaggctagtccgttatcaacttgaaaaagtggcaccgagtcggtgctttt

SEQ ID NO: 617 - RNA, 100 nt, synthetic construct
  source 1..100: mol_type = other RNA
tcaggagaagtgagtataaagttttagagctagaaatagcaagttaaaataaggctagtccgttatcaacttgaaaaagtggcaccgagtcggtgctttt

SEQ ID NO: 618 - RNA, 109 nt, synthetic construct
  source 1..109: mol_type = other RNA
tctgactgcaaacctgctgatgttttagtactctgtaatgaaaattacagaatctactaaaacaaggcaaaatgccgtgtttatctcgtcaacttgttggcgagatttt

SEQ ID NO: 619 - RNA, 100 nt, synthetic construct
  source 1..100: mol_type = other RNA
tgagctaggctgcttatcccgttttagagctagaaatagcaagttaaaataaggctagtccgttatcaacttgaaaaagtggcaccgagtcggtgctttt

SEQ ID NO: 620 - RNA, 100 nt, synthetic construct
  source 1..100: mol_type = other RNA
tgccaatctgactgcaaaccgttttagagctagaaatagcaagttaaaataaggctagtccgttatcaacttgaaaaagtggcaccgagtcggtgctttt

SEQ ID NO: 621 - RNA, 100 nt, synthetic construct
  source 1..100: mol_type = other RNA
tgctctaatctctctagacagttttagagctagaaatagcaagttaaaataaggctagtccgttatcaacttgaaaaagtggcaccgagtcggtgctttt

SEQ ID NO: 622 - RNA, 100 nt, synthetic construct
  source 1..100: mol_type = other RNA
tgtgatggctgctcccagccgttttagagctagaaatagcaagttaaaataaggctagtccgttatcaacttgaaaaagtggcaccgagtcggtgctttt

SEQ ID NO: 623 - RNA, 100 nt, synthetic construct
  source 1..100: mol_type = other RNA
ttggcagggataagcagcctgttttagagctagaaatagcaagttaaaataaggctagtccgttatcaacttgaaaaagtggcaccgagtcggtgctttt

SEQ ID NO: 624 - RNA, 100 nt, synthetic construct
  source 1..100: mol_type = other RNA
ttttatactcacttctcctggttttagagctagaaatagcaagttaaaataaggctagtccgttatcaacttgaaaaagtggcaccgagtcggtgctttt

SEQ ID NO: 625 - RNA, 20 nt, synthetic construct
  source 1..20: mol_type = other RNA
actcacctctgcatgctcat

SEQ ID NO: 626 - RNA, 20 nt, synthetic construct
  source 1..20: mol_type = other RNA
taccacctatgagagaagac

SEQ ID NO: 627 - RNA, 21 nt, synthetic construct
  source 1..21: mol_type = other RNA
atactcacctctgcatgctca

SEQ ID NO: 628 - RNA, 21 nt, synthetic construct
  source 1..21: mol_type = other RNA
actggttttcctataaggtgt

SEQ ID NO: 629 - RNA, 22 nt, synthetic construct
  source 1..22: mol_type = other RNA
ttggcaggatggcttctcatcg

SEQ ID NO: 630 - RNA, 22 nt, synthetic construct
  source 1..22: mol_type = other RNA
tcctataaggtgtgaaagtctg

SEQ ID NO: 631 - RNA, 22 nt, synthetic construct
  source 1..22: mol_type = other RNA
tgagcccatgcagctctccaga

SEQ ID NO: 632 - RNA, 22 nt, synthetic construct
  source 1..22: mol_type = other RNA
ctcctcagttgtgagcccatgc

SEQ ID NO: 633 - RNA, 22 nt, synthetic construct
  source 1..22: mol_type = other RNA
gtagaagggatatacaaagtgg

SEQ ID NO: 634 - RNA, 22 nt, synthetic construct
  source 1..22: mol_type = other RNA
ccactttgtatatcccttctac

SEQ ID NO: 635 - RNA, 22 nt, synthetic construct
  source 1..22: mol_type = other RNA
ggtgtctatttccactttgtat

SEQ ID NO: 636 - RNA, 22 nt, synthetic construct
  source 1..22: mol_type = other RNA
catgagcatgcagaggtgagta

SEQ ID NO: 637 - RNA, 20 nt, synthetic construct
  source 1..20: mol_type = other RNA
ggctatcgtcaccaatccca

SEQ ID NO: 638 - RNA, 20 nt, synthetic construct
  source 1..20: mol_type = other RNA
gctatcgtcaccaatcccaa

SEQ ID NO: 639 - RNA, 20 nt, Homo sapiens
  source 1..20: mol_type = genomic RNA
actcacctctgcatgctcat

SEQ ID NO: 640 - RNA, 20 nt, Homo sapiens
  source 1..20: mol_type = genomic RNA
taccacctatgagagaagac

SEQ ID NO: 641 - RNA, 21 nt, Homo sapiens
  source 1..21: mol_type = genomic RNA
atactcacctctgcatgctca

SEQ ID NO: 642 - RNA, 21 nt, Homo sapiens
  source 1..21: mol_type = genomic RNA
actggttttcctataaggtgt

SEQ ID NO: 643 - RNA, 22 nt, Homo sapiens
  source 1..22: mol_type = genomic RNA
ttggcaggatggcttctcatcg

SEQ ID NO: 644 - RNA, 26 nt, Homo sapiens
  source 1..26: mol_type = genomic RNA
gttttcctataaggtgtgaaagtctg

SEQ ID NO: 645 - RNA, 26 nt, Homo sapiens
  source 1..26: mol_type = genomic RNA
gttgtgagcccatgcagctctccaga

SEQ ID NO: 646 - RNA, 26 nt, Homo sapiens
  source 1..26: mol_type = genomic RNA
attcctcctcagttgtgagcccatgc

SEQ ID NO: 647 - RNA, 26 nt, Homo sapiens
  source 1..26: mol_type = genomic RNA
atttgtagaagggatatacaaagtgg

SEQ ID NO: 648 - RNA, 26 nt, Homo sapiens
  source 1..26: mol_type = genomic RNA
atttccactttgtatatcccttctac

SEQ ID NO: 649 - RNA, 26 nt, Homo sapiens
  source 1..26: mol_type = genomic RNA
atttggtgtctatttccactttgtat

SEQ ID NO: 650 - RNA, 26 nt, Homo sapiens
  source 1..26: mol_type = genomic RNA
attccatgagcatgcagaggtgagta

SEQ ID NO: 651 - RNA, 20 nt, Homo sapiens
  source 1..20: mol_type = genomic RNA
ggctatcgtcaccaatccca

SEQ ID NO: 652 - RNA, 20 nt, Homo sapiens
  source 1..20: mol_type = genomic RNA
gctatcgtcaccaatcccaa

SEQ ID NO: 653 - skipped

SEQ ID NO: 654 - RNA, 21 nt, synthetic construct
  source 1..21: mol_type = other RNA
aagcagcctagctcaggagaa

SEQ ID NO: 655 - RNA, 20 nt, synthetic construct
  source 1..20: mol_type = other RNA
aagtccactcattcttggca

SEQ ID NO: 656 - RNA, 21 nt, synthetic construct
  source 1..21: mol_type = other RNA
acgatgagaagccatcctgcc

SEQ ID NO: 657 - RNA, 20 nt, synthetic construct
  source 1..20: mol_type = other RNA
agacaaggttcatatttgta

SEQ ID NO: 658 - RNA, 20 nt, synthetic construct
  source 1..20: mol_type = other RNA
aggctgggagcagccatcac

SEQ ID NO: 659 - RNA, 20 nt, synthetic construct
  source 1..20: mol_type = other RNA
ataagtaacccatacaaata

SEQ ID NO: 660 - RNA, 20 nt, synthetic construct
  source 1..20: mol_type = other RNA
atactcacttctcctgagct

SEQ ID NO: 661 - RNA, 20 nt, synthetic construct
  source 1..20: mol_type = other RNA
attattgacttagtcaacaa

SEQ ID NO: 662 - RNA, 20 nt, synthetic construct
  source 1..20: mol_type = other RNA
caaatatgaaccttgtctag

SEQ ID NO: 663 - RNA, 21 nt, synthetic construct
  source 1..21: mol_type = other RNA
cagaagtccactcattcttgg

SEQ ID NO: 664 - RNA, 21 nt, synthetic construct
  source 1..21: mol_type = other RNA
caggctgggagcagccatcac

SEQ ID NO: 665 - RNA, 20 nt, synthetic construct
  source 1..20: mol_type = other RNA
ccatcctgccaagaatgagt

SEQ ID NO: 666 - RNA, 21 nt, synthetic construct
  source 1..21: mol_type = other RNA
cctgctgattctgattattga

SEQ ID NO: 667 - RNA, 21 nt, synthetic construct
  source 1..21: mol_type = other RNA
cgatgctctaatctctctaga

SEQ ID NO: 668 - RNA, 21 nt, synthetic construct
  source 1..21: mol_type = other RNA
ctaagtcaataatcagaatca

SEQ ID NO: 669 - RNA, 21 nt, synthetic construct
  source 1..21: mol_type = other RNA
ctagacaaggttcatatttgt

SEQ ID NO: 670 - RNA, 20 nt, synthetic construct
  source 1..20: mol_type = other RNA
gaaccttgtctagagagatt

SEQ ID NO: 671 - RNA, 20 nt, synthetic construct
  source 1..20: mol_type = other RNA
gaagtccactcattcttggc

SEQ ID NO: 672 - RNA, 20 nt, synthetic construct
  source 1..20: mol_type = other RNA
gaatcagcaggtttgcagtc

SEQ ID NO: 673 - RNA, 20 nt, synthetic construct
  source 1..20: mol_type = other RNA
gaatgagtggacttctgtga

SEQ ID NO: 674 - RNA, 20 nt, synthetic construct
  source 1..20: mol_type = other RNA
gactgcaaacctgctgattc

SEQ ID NO: 675 - RNA, 21 nt, synthetic construct
  source 1..21: mol_type = other RNA
gacttagtcaacaaagagaga

SEQ ID NO: 676 - RNA, 20 nt, synthetic construct
  source 1..20: mol_type = other RNA
gataagcagcctagctcagg

SEQ ID NO: 677 - RNA, 20 nt, synthetic construct
  source 1..20: mol_type = other RNA
gatgagaagccatcctgcca

SEQ ID NO: 678 - skipped

SEQ ID NO: 679 - RNA, 20 nt, synthetic construct
  source 1..20: mol_type = other RNA
gcttttatactcacttctcc

SEQ ID NO: 680 - RNA, 21 nt, synthetic construct
  source 1..21: mol_type = other RNA
ggataagcagcctagctcagg

SEQ ID NO: 681 - RNA, 20 nt, synthetic construct
  source 1..20: mol_type = other RNA
gtctagagagattagagcat

SEQ ID NO: 682 - RNA, 20 nt, synthetic construct
  source 1..20: mol_type = other RNA
gtgatggctgctcccagcct

SEQ ID NO: 683 - RNA, 21 nt, synthetic construct
  source 1..21: mol_type = other RNA
tacttattctctctttgttga

SEQ ID NO: 684 - RNA, 21 nt, synthetic construct
  source 1..21: mol_type = other RNA
tattctctctttgttgactaa

SEQ ID NO: 685 - RNA, 20 nt, synthetic construct
  source 1..20: mol_type = other RNA
tattgacttagtcaacaaag

SEQ ID NO: 686 - RNA, 21 nt, synthetic construct
  source 1..21: mol_type = other RNA
tattgacttagtcaacaaaga

SEQ ID NO: 687 - RNA, 21 nt, synthetic construct
  source 1..21: mol_type = other RNA
tcagaatcagcaggtttgcag

SEQ ID NO: 688 - RNA, 20 nt, synthetic construct
  source 1..20: mol_type = other RNA
tccactcattcttggcagga

SEQ ID NO: 689 - RNA, 21 nt, synthetic construct
  source 1..21: mol_type = other RNA
tctctctttgttgactaagtc

SEQ ID NO: 690 - RNA, 21 nt, synthetic construct
  source 1..21: mol_type = other RNA
tgagaagccatcctgccaaga

SEQ ID NO: 691 - RNA, 21 nt, synthetic construct
  source 1..21: mol_type = other RNA
tgagctaggctgcttatccct

SEQ ID NO: 692 - RNA, 20 nt, synthetic construct
  source 1..20: mol_type = other RNA
tgagtataaaagccccaggc

SEQ ID NO: 693 - RNA, 20 nt, synthetic construct
  source 1..20: mol_type = other RNA
tgatggctgctcccagcctg

SEQ ID NO: 694 - RNA, 21 nt, synthetic construct
  source 1..21: mol_type = other RNA
tgccaagaatgagtggacttc

SEQ ID NO: 695 - RNA, 21 nt, synthetic construct
  source 1..21: mol_type = other RNA
tgccaatctgactgcaaacct

SEQ ID NO: 696 - RNA, 20 nt, synthetic construct
  source 1..20: mol_type = other RNA
tgttgactaagtcaataatc

SEQ ID NO: 697 - RNA, 20 nt, synthetic construct
  source 1..20: mol_type = other RNA
ttgacttagtcaacaaagag

SEQ ID NO: 698 - RNA, 21 nt, synthetic construct
  source 1..21: mol_type = other RNA
tttgttgactaagtcaataat

SEQ ID NO: 699 - RNA, 20 nt, synthetic construct
  source 1..20: mol_type = other RNA
aacctgctgattctgattat

SEQ ID NO: 700 - RNA, 20 nt, synthetic construct
  source 1..20: mol_type = other RNA
caacttacccagaggcaaat

SEQ ID NO: 701 - RNA, 20 nt, synthetic construct
  source 1..20: mol_type = other RNA
aatggctcccaggtgtcatc

SEQ ID NO: 702 - RNA, 20 nt, synthetic construct
  source 1..20: mol_type = other RNA
ggctcccaggtgtcatcagc

SEQ ID NO: 703 - RNA, 20 nt, synthetic construct
  source 1..20: mol_type = other RNA
ctctcataggtggtattcac

SEQ ID NO: 704-706 - skipped (3 entries)

SEQ ID NO: 707 - RNA, 20 nt, synthetic construct
  source 1..20: mol_type = other RNA
tctgtatactcacctctgca

SEQ ID NO: 708 - RNA, 20 nt, synthetic construct
  source 1..20: mol_type = other RNA
gaaacactcaccgtagggcc

SEQ ID NO: 709 - RNA, 20 nt, synthetic construct
  source 1..20: mol_type = other RNA
ctctacacccagggcaccgg

SEQ ID NO: 710 - RNA, 20 nt, synthetic construct
  source 1..20: mol_type = other RNA
acaccttataggaaaaccag

SEQ ID NO: 711 - RNA, 20 nt, synthetic construct
  source 1..20: mol_type = other RNA
ataggaaaaccagtgagtct

SEQ ID NO: 712 - skipped

SEQ ID NO: 713 - RNA, 20 nt, synthetic construct
  source 1..20: mol_type = other RNA
ctcaccgtagggccagcctc

SEQ ID NO: 714 - RNA, 20 nt, synthetic construct
  source 1..20: mol_type = other RNA
aaaagccccaggctgggagc

SEQ ID NO: 715 - RNA, 20 nt, synthetic construct
  source 1..20: mol_type = other RNA
aagtgagtataaaagcccca

SEQ ID NO: 716 - RNA, 21 nt, synthetic construct
  source 1..21: mol_type = other RNA
aataatcagaatcagcaggtt

SEQ ID NO: 717 - RNA, 20 nt, synthetic construct
  source 1..20: mol_type = other RNA
aatatgaaccttgtctagag

SEQ ID NO: 718 - RNA, 20 nt, synthetic construct
  source 1..20: mol_type = other RNA
aatgagtggacttctgtgat

SEQ ID NO: 719 - RNA, 21 nt, synthetic construct
  source 1..21: mol_type = other RNA
acaaatatgaaccttgtctag

SEQ ID NO: 720 - RNA, 20 nt, synthetic construct
  source 1..20: mol_type = other RNA
acagaagtccactcattctt

SEQ ID NO: 721 - RNA, 20 nt, synthetic construct
  source 1..20: mol_type = other RNA
accttgtctagagagattag

SEQ ID NO: 722 - RNA, 20 nt, synthetic construct
  source 1..20: mol_type = other RNA
agaagccatcctgccaagaa

SEQ ID NO: 723 - RNA, 20 nt, synthetic construct
  source 1..20: mol_type = other RNA
agcaggtttgcagtcagatt

SEQ ID NO: 724 - RNA, 20 nt, synthetic construct
  source 1..20: mol_type = other RNA
agggataagcagcctagctc

SEQ ID NO: 725 - RNA, 20 nt, synthetic construct
  source 1..20: mol_type = other RNA
aggtttgcagtcagattggc

SEQ ID NO: 726 - RNA, 20 nt, synthetic construct
  source 1..20: mol_type = other RNA
agtataaaagccccaggctg

SEQ ID NO: 727 - RNA, 20 nt, synthetic construct
  source 1..20: mol_type = other RNA
agtcaataatcagaatcagc

SEQ ID NO: 728 - RNA, 20 nt, synthetic construct
  source 1..20: mol_type = other RNA
ataatcagaatcagcaggtt

SEQ ID NO: 729 - RNA, 22 nt, synthetic construct
  source 1..22: mol_type = other RNA
ttgacttagtcaacaaagagag

SEQ ID NO: 730 - RNA, 22 nt, synthetic construct
  source 1..22: mol_type = other RNA
tctctttgttgactaagtcaat

SEQ ID NO: 731 - RNA, 22 nt, synthetic construct
  source 1..22: mol_type = other RNA
tgattattgacttagtcaacaa

SEQ ID NO: 732 - skipped

SEQ ID NO: 733 - RNA, 22 nt, synthetic construct
  source 1..22: mol_type = other RNA
acttagtcaacaaagagagaat

SEQ ID NO: 734 - RNA, 22 nt, synthetic construct
  source 1..22: mol_type = other RNA
gcagggataagcagcctagctc

SEQ ID NO: 735 - RNA, 22 nt, synthetic construct
  source 1..22: mol_type = other RNA
gtatgggttacttattctctct

SEQ ID NO: 736 - RNA, 20 nt, synthetic construct
  source 1..20: mol_type = other RNA
caagaatgagtggacttctg

SEQ ID NO: 737 - RNA, 20 nt, synthetic construct
  source 1..20: mol_type = other RNA
caatctgactgcaaacctgc

SEQ ID NO: 738 - RNA, 20 nt, synthetic construct
  source 1..20: mol_type = other RNA
cacagaagtccactcattct

SEQ ID NO: 739 - RNA, 20 nt, synthetic construct
  source 1..20: mol_type = other RNA
cagacgatgagaagccatcc

SEQ ID NO: 740 - RNA, 20 nt, synthetic construct
  source 1..20: mol_type = other RNA
cagcaggtttgcagtcagat

SEQ ID NO: 741 - RNA, 20 nt, synthetic construct
  source 1..20: mol_type = other RNA
caggatggcttctcatcgtc

SEQ ID NO: 742 - RNA, 21 nt, synthetic construct
  source 1..21: mol_type = other RNA
caggtttgcagtcagattggc

SEQ ID NO: 743 - RNA, 20 nt, synthetic construct
  source 1..20: mol_type = other RNA
cagtcagattggcagggata

SEQ ID NO: 744 - RNA, 20 nt, synthetic construct
  source 1..20: mol_type = other RNA
ccactcattcttggcaggat

SEQ ID NO: 745 - RNA, 20 nt, synthetic construct
  source 1..20: mol_type = other RNA
ctaagtcaataatcagaatc

SEQ ID NO: 746 - RNA, 22 nt, synthetic construct
  source 1..22: mol_type = other RNA
gtcaacaaagagagaataagta

SEQ ID NO: 747 - RNA, 20 nt, synthetic construct
  source 1..20: mol_type = other RNA
cttatccctgccaatctgac

SEQ ID NO: 748 - RNA, 22 nt, synthetic construct
  source 1..22: mol_type = other RNA
tccctgccaatctgactgcaaa

SEQ ID NO: 749 - RNA, 22 nt, synthetic construct
  source 1..22: mol_type = other RNA
ttctctctttgttgactaagtc

SEQ ID NO: 750 - RNA, 22 nt, synthetic construct
  source 1..22: mol_type = other RNA
tcctgagctaggctgcttatcc

SEQ ID NO: 751 - RNA, 20 nt, synthetic construct
  source 1..20: mol_type = other RNA
cttctgtgatggctgctccc

SEQ ID NO: 752 - RNA, 22 nt, synthetic construct
  source 1..22: mol_type = other RNA
tgtgatggctgctcccagcctg

SEQ ID NO: 753 - RNA, 22 nt, synthetic construct
  source 1..22: mol_type = other RNA
gcaggatggcttctcatcgtct

SEQ ID NO: 754 - RNA, 22 nt, synthetic construct
  source 1..22: mol_type = other RNA
tctagagagattagagcatcgg

SEQ ID NO: 755 - RNA, 22 nt, synthetic construct
  source 1..22: mol_type = other RNA
gttgactaagtcaataatcaga

SEQ ID NO: 756 - RNA, 22 nt, synthetic construct
  source 1..22: mol_type = other RNA
tatactcacttctcctgagcta

SEQ ID NO: 757 - RNA, 20 nt, synthetic construct
  source 1..20: mol_type = other RNA
gaagtgagtataaaagcccc

SEQ ID NO: 758 - RNA, 20 nt, synthetic construct
  source 1..20: mol_type = other RNA
gacaaggttcatatttgtat

SEQ ID NO: 759 - RNA, 20 nt, synthetic construct
  source 1..20: mol_type = other RNA
gagtataaaagccccaggct

SEQ ID NO: 760 - RNA, 20 nt, synthetic construct
  source 1..20: mol_type = other RNA
gagtggacttctgtgatggc

SEQ ID NO: 761 - RNA, 20 nt, synthetic construct
  source 1..20: mol_type = other RNA
gatggctgctcccagcctgg

SEQ ID NO: 762 - RNA, 20 nt, synthetic construct
  source 1..20: mol_type = other RNA
gcagcctagctcaggagaag

SEQ ID NO: 763 - RNA, 20 nt, synthetic construct
  source 1..20: mol_type = other RNA
gctgcttatccctgccaatc

SEQ ID NO: 764 - RNA, 20 nt, synthetic construct
  source 1..20: mol_type = other RNA
gggataagcagcctagctca

SEQ ID NO: 765 - RNA, 20 nt, synthetic construct
  source 1..20: mol_type = other RNA
ggtttgcagtcagattggca

SEQ ID NO: 766 - RNA, 20 nt, synthetic construct
  source 1..20: mol_type = other RNA
gttacttattctctctttgt

SEQ ID NO: 767 - RNA, 22 nt, synthetic construct
  source 1..22: mol_type = other RNA
cttattctctctttgttgacta

SEQ ID NO: 768 - RNA, 22 nt, synthetic construct
  source 1..22: mol_type = other RNA
atatttgtatgggttacttatt

SEQ ID NO: 769 - RNA, 22 nt, synthetic construct
  source 1..22: mol_type = other RNA
actaagtcaataatcagaatca

SEQ ID NO: 770 - RNA, 20 nt, synthetic construct
  source 1..20: mol_type = other RNA
gtttgcagtcagattggcag

SEQ ID NO: 771 - RNA, 22 nt, synthetic construct
  source 1..22: mol_type = other RNA
gcagtcagattggcagggataa

SEQ ID NO: 772 - RNA, 20 nt, synthetic construct
  source 1..20: mol_type = other RNA
tacaaatatgaaccttgtct

SEQ ID NO: 773 - RNA, 20 nt, synthetic construct
  source 1..20: mol_type = other RNA
tactcacttctcctgagcta

SEQ ID NO: 774 - RNA, 20 nt, synthetic construct
  source 1..20: mol_type = other RNA
tataaaagccccaggctggg

SEQ ID NO: 775 - RNA, 20 nt, synthetic construct
  source 1..20: mol_type = other RNA
tcacttctcctgagctaggc

SEQ ID NO: 776 - RNA, 20 nt, synthetic construct
  source 1..20: mol_type = other RNA
tcagattggcagggataagc

SEQ ID NO: 777 - RNA, 20 nt, synthetic construct
  source 1..20: mol_type = other RNA
tcaggagaagtgagtataaa

SEQ ID NO: 778 - RNA, 21 nt, synthetic construct
  source 1..21: mol_type = other RNA
tctgactgcaaacctgctgat

SEQ ID NO: 779 - RNA, 20 nt, synthetic construct
  source 1..20: mol_type = other RNA
tgagctaggctgcttatccc

SEQ ID NO: 780 - RNA, 20 nt, synthetic construct
  source 1..20: mol_type = other RNA
tgccaatctgactgcaaacc

SEQ ID NO: 781 - RNA, 20 nt, synthetic construct
  source 1..20: mol_type = other RNA
tgctctaatctctctagaca

SEQ ID NO: 782 - RNA, 20 nt, synthetic construct
  source 1..20: mol_type = other RNA
tgtgatggctgctcccagcc

SEQ ID NO: 783 - RNA, 20 nt, synthetic construct
  source 1..20: mol_type = other RNA
ttggcagggataagcagcct

SEQ ID NO: 784 - RNA, 20 nt, synthetic construct
  source 1..20: mol_type = other RNA
ttttatactcacttctcctg

SEQ ID NO: 785 - DNA, 21 bp, Homo sapiens
  source 1..21: mol_type = genomic DNA
aagagagaataagtaacccat

SEQ ID NO: 786 - DNA, 21 bp, Homo sapiens
  source 1..21: mol_type = genomic DNA
aagcagcctagctcaggagaa

SEQ ID NO: 787 - DNA, 20 bp, Homo sapiens
  source 1..20: mol_type = genomic DNA
aagtccactcattcttggca

SEQ ID NO: 788 - DNA, 21 bp, Homo sapiens
  source 1..21: mol_type = genomic DNA
acgatgagaagccatcctgcc

SEQ ID NO: 789 - DNA, 20 bp, Homo sapiens
  source 1..20: mol_type = genomic DNA
agacaaggttcatatttgta

SEQ ID NO: 790 - DNA, 20 bp, Homo sapiens
  source 1..20: mol_type = genomic DNA
aggctgggagcagccatcac

SEQ ID NO: 791 - DNA, 20 bp, Homo sapiens
  source 1..20: mol_type = genomic DNA
ataagtaacccatacaaata

SEQ ID NO: 792 - DNA, 20 bp, Homo sapiens
  source 1..20: mol_type = genomic DNA
atactcacttctcctgagct

SEQ ID NO: 793 - DNA, 20 bp, Homo sapiens
  source 1..20: mol_type = genomic DNA
attattgacttagtcaacaa

SEQ ID NO: 794 - DNA, 20 bp, Homo sapiens
  source 1..20: mol_type = genomic DNA
caaatatgaaccttgtctag

SEQ ID NO: 795 - DNA, 21 bp, Homo sapiens
  source 1..21: mol_type = genomic DNA
cagaagtccactcattcttgg

SEQ ID NO: 796 - DNA, 21 bp, Homo sapiens
  source 1..21: mol_type = genomic DNA
caggctgggagcagccatcac

SEQ ID NO: 797 - DNA, 20 bp, Homo sapiens
  source 1..20: mol_type = genomic DNA
ccatcctgccaagaatgagt

SEQ ID NO: 798 - DNA, 21 bp, Homo sapiens
  source 1..21: mol_type = genomic DNA
cctgctgattctgattattga

SEQ ID NO: 799 - DNA, 21 bp, Homo sapiens
  source 1..21: mol_type = genomic DNA
cgatgctctaatctctctaga

SEQ ID NO: 800 - DNA, 21 bp, Homo sapiens
  source 1..21: mol_type = genomic DNA
ctaagtcaataatcagaatca

SEQ ID NO: 801 - DNA, 21 bp, Homo sapiens
  source 1..21: mol_type = genomic DNA
ctagacaaggttcatatttgt

SEQ ID NO: 802 - DNA, 20 bp, Homo sapiens
  source 1..20: mol_type = genomic DNA
gaaccttgtctagagagatt

SEQ ID NO: 803 - DNA, 20 bp, Homo sapiens
  source 1..20: mol_type = genomic DNA
gaagtccactcattcttggc

SEQ ID NO: 804 - DNA, 20 bp, Homo sapiens
  source 1..20: mol_type = genomic DNA
gaatcagcaggtttgcagtc

SEQ ID NO: 805 - DNA, 20 bp, Homo sapiens
  source 1..20: mol_type = genomic DNA
gaatgagtggacttctgtga

SEQ ID NO: 806 - DNA, 20 bp, Homo sapiens
  source 1..20: mol_type = genomic DNA
gactgcaaacctgctgattc

SEQ ID NO: 807 - DNA, 21 bp, Homo sapiens
  source 1..21: mol_type = genomic DNA
gacttagtcaacaaagagaga

SEQ ID NO: 808 - DNA, 20 bp, Homo sapiens
  source 1..20: mol_type = genomic DNA
gataagcagcctagctcagg

SEQ ID NO: 809 - DNA, 20 bp, Homo sapiens
  source 1..20: mol_type = genomic DNA
gatgagaagccatcctgcca

SEQ ID NO: 810 - skipped

SEQ ID NO: 811 - DNA, 20 bp, Homo sapiens
  source 1..20: mol_type = genomic DNA
gcttttatactcacttctcc

SEQ ID NO: 812 - DNA, 21 bp, Homo sapiens
  source 1..21: mol_type = genomic DNA
ggataagcagcctagctcagg

SEQ ID NO: 813 - DNA, 20 bp, Homo sapiens
  source 1..20: mol_type = genomic DNA
gtctagagagattagagcat

SEQ ID NO: 814 - DNA, 20 bp, Homo sapiens
  source 1..20: mol_type = genomic DNA
gtgatggctgctcccagcct

SEQ ID NO: 815 - DNA, 21 bp, Homo sapiens
  source 1..21: mol_type = genomic DNA
tacttattctctctttgttga

SEQ ID NO: 816 - DNA, 21 bp, Homo sapiens
  source 1..21: mol_type = genomic DNA
tattctctctttgttgactaa

SEQ ID NO: 817 - DNA, 20 bp, Homo sapiens
  source 1..20: mol_type = genomic DNA
tattgacttagtcaacaaag

SEQ ID NO: 818 - DNA, 21 bp, Homo sapiens
  source 1..21: mol_type = genomic DNA
tattgacttagtcaacaaaga

SEQ ID NO: 819 - DNA, 21 bp, Homo sapiens
  source 1..21: mol_type = genomic DNA
tcagaatcagcaggtttgcag

SEQ ID NO: 820 - DNA, 20 bp, Homo sapiens
  source 1..20: mol_type = genomic DNA
tccactcattcttggcagga

SEQ ID NO: 821 - DNA, 21 bp, Homo sapiens
  source 1..21: mol_type = genomic DNA
tctctctttgttgactaagtc

SEQ ID NO: 822 - DNA, 21 bp, Homo sapiens
  source 1..21: mol_type = genomic DNA
tgagaagccatcctgccaaga

SEQ ID NO: 823 - DNA, 21 bp, Homo sapiens
  source 1..21: mol_type = genomic DNA
tgagctaggctgcttatccct

SEQ ID NO: 824 - DNA, 20 bp, Homo sapiens
  source 1..20: mol_type = genomic DNA
tgagtataaaagccccaggc

SEQ ID NO: 825 - DNA, 20 bp, Homo sapiens
  source 1..20: mol_type = genomic DNA
tgatggctgctcccagcctg

SEQ ID NO: 826 - DNA, 21 bp, Homo sapiens
  source 1..21: mol_type = genomic DNA
tgccaagaatgagtggacttc

SEQ ID NO: 827 - DNA, 21 bp, Homo sapiens
  source 1..21: mol_type = genomic DNA
tgccaatctgactgcaaacct

SEQ ID NO: 828 - DNA, 20 bp, Homo sapiens
  source 1..20: mol_type = genomic DNA
tgttgactaagtcaataatc

SEQ ID NO: 829 - DNA, 20 bp, Homo sapiens
  source 1..20: mol_type = genomic DNA
ttgacttagtcaacaaagag

SEQ ID NO: 830 - DNA, 21 bp, Homo sapiens
  source 1..21: mol_type = genomic DNA
tttgttgactaagtcaataat

SEQ ID NO: 831 - DNA, 20 bp, Homo sapiens
  source 1..20: mol_type = genomic DNA
aacctgctgattctgattat

SEQ ID NO: 832 - DNA, 20 bp, Homo sapiens
  source 1..20: mol_type = genomic DNA
caacttacccagaggcaaat

SEQ ID NO: 833 - DNA, 20 bp, Homo sapiens
  source 1..20: mol_type = genomic DNA
aatggctcccaggtgtcatc

SEQ ID NO: 834 - DNA, 20 bp, Homo sapiens
  source 1..20: mol_type = genomic DNA
ggctcccaggtgtcatcagc

SEQ ID NO: 835 - DNA, 20 bp, Homo sapiens
  source 1..20: mol_type = genomic DNA
ctctcataggtggtattcac

SEQ ID NO: 836 - DNA, 20 bp, Homo sapiens
  source 1..20: mol_type = genomic DNA
tctgtatactcacctctgca

SEQ ID NO: 837 - DNA, 20 bp, Homo sapiens
  source 1..20: mol_type = genomic DNA
gaaacactcaccgtagggcc

SEQ ID NO: 838 - DNA, 20 bp, Homo sapiens
  source 1..20: mol_type = genomic DNA
ctctacacccagggcaccgg

SEQ ID NO: 839 - DNA, 20 bp, Homo sapiens
  source 1..20: mol_type = genomic DNA
acaccttataggaaaaccag

SEQ ID NO: 840 - DNA, 20 bp, Homo sapiens
  source 1..20: mol_type = genomic DNA
ataggaaaaccagtgagtct

SEQ ID NO: 841 - DNA, 20 bp, Homo sapiens
  source 1..20: mol_type = genomic DNA
ctcaccgtagggccagcctc

SEQ ID NO: 842 - DNA, 20 bp, Homo sapiens
  source 1..20: mol_type = genomic DNA
aaaagccccaggctgggagc

SEQ ID NO: 843 - DNA, 20 bp, Homo sapiens
  source 1..20: mol_type = genomic DNA
aagtgagtataaaagcccca

SEQ ID NO: 844 - DNA, 21 bp, Homo sapiens
  source 1..21: mol_type = genomic DNA
aataatcagaatcagcaggtt

SEQ ID NO: 845 - DNA, 20 bp, Homo sapiens
  source 1..20: mol_type = genomic DNA
aatatgaaccttgtctagag

SEQ ID NO: 846 - DNA, 20 bp, Homo sapiens
  source 1..20: mol_type = genomic DNA
aatgagtggacttctgtgat

SEQ ID NO: 847 - DNA, 21 bp, Homo sapiens
  source 1..21: mol_type = genomic DNA
acaaatatgaaccttgtctag

SEQ ID NO: 848 - DNA, 20 bp, Homo sapiens
  source 1..20: mol_type = genomic DNA
acagaagtccactcattctt

SEQ ID NO: 849 - DNA, 20 bp, Homo sapiens
  source 1..20: mol_type = genomic DNA
accttgtctagagagattag

SEQ ID NO: 850 - DNA, 20 bp, Homo sapiens
  source 1..20: mol_type = genomic DNA
agaagccatcctgccaagaa

SEQ ID NO: 851 - DNA, 20 bp, Homo sapiens
  source 1..20: mol_type = genomic DNA
agcaggtttgcagtcagatt

SEQ ID NO: 852 - DNA, 20 bp, Homo sapiens
  source 1..20: mol_type = genomic DNA
agggataagcagcctagctc

SEQ ID NO: 853 - DNA, 20 bp, Homo sapiens
  source 1..20: mol_type = genomic DNA
aggtttgcagtcagattggc

SEQ ID NO: 854 - DNA, 20 bp, Homo sapiens
  source 1..20: mol_type = genomic DNA
agtataaaagccccaggctg

SEQ ID NO: 855 - DNA, 20 bp, Homo sapiens
  source 1..20: mol_type = genomic DNA
agtcaataatcagaatcagc

SEQ ID NO: 856 - DNA, 20 bp, Homo sapiens
  source 1..20: mol_type = genomic DNA
ataatcagaatcagcaggtt

SEQ ID NO: 857 - DNA, 22 bp, Homo sapiens
  source 1..22: mol_type = genomic DNA
ttgacttagtcaacaaagagag

SEQ ID NO: 858 - DNA, 22 bp, Homo sapiens
  source 1..22: mol_type = genomic DNA
tctctttgttgactaagtcaat

SEQ ID NO: 859 - DNA, 22 bp, Homo sapiens
  source 1..22: mol_type = genomic DNA
tgattattgacttagtcaacaa

SEQ ID NO: 860 - DNA, 22 bp, Homo sapiens
  source 1..22: mol_type = genomic DNA
acttagtcaacaaagagagaat

SEQ ID NO: 861 - DNA, 22 bp, Homo sapiens
  source 1..22: mol_type = genomic DNA
gcagggataagcagcctagctc

SEQ ID NO: 862 - DNA, 22 bp, Homo sapiens
  source 1..22: mol_type = genomic DNA
gtatgggttacttattctctct

SEQ ID NO: 863 - DNA, 20 bp, Homo sapiens
  source 1..20: mol_type = genomic DNA
caagaatgagtggacttctg

SEQ ID NO: 864 - DNA, 20 bp, Homo sapiens
  source 1..20: mol_type = genomic DNA
caatctgactgcaaacctgc

SEQ ID NO: 865 - DNA, 20 bp, Homo sapiens
  source 1..20: mol_type = genomic DNA
cacagaagtccactcattct

SEQ ID NO: 866 - DNA, 20 bp, Homo sapiens
  source 1..20: mol_type = genomic DNA
cagacgatgagaagccatcc

SEQ ID NO: 867 - DNA, 20 bp, Homo sapiens
  source 1..20: mol_type = genomic DNA
cagcaggtttgcagtcagat

SEQ ID NO: 868 - DNA, 20 bp, Homo sapiens
  source 1..20: mol_type = genomic DNA
caggatggcttctcatcgtc

SEQ ID NO: 869 - DNA, 21 bp, Homo sapiens
  source 1..21: mol_type = genomic DNA
caggtttgcagtcagattggc

SEQ ID NO: 870 - DNA, 20 bp, Homo sapiens
  source 1..20: mol_type = genomic DNA
cagtcagattggcagggata

SEQ ID NO: 871 - DNA, 20 bp, Homo sapiens
  source 1..20: mol_type = genomic DNA
ccactcattcttggcaggat

SEQ ID NO: 872 - DNA, 20 bp, Homo sapiens
  source 1..20: mol_type = genomic DNA
ctaagtcaataatcagaatc

SEQ ID NO: 873 - DNA, 22 bp, Homo sapiens
  source 1..22: mol_type = genomic DNA
gtcaacaaagagagaataagta

SEQ ID NO: 874 - DNA, 20 bp, Homo sapiens
  source 1..20: mol_type = genomic DNA
cttatccctgccaatctgac

SEQ ID NO: 875 - DNA, 22 bp, Homo sapiens
  source 1..22: mol_type = genomic DNA
tccctgccaatctgactgcaaa

SEQ ID NO: 876 - DNA, 22 bp, Homo sapiens
  source 1..22: mol_type = genomic DNA
ttctctctttgttgactaagtc

SEQ ID NO: 877 - DNA, 22 bp, Homo sapiens
  source 1..22: mol_type = genomic DNA
tcctgagctaggctgcttatcc

SEQ ID NO: 878 - DNA, 20 bp, Homo sapiens
  source 1..20: mol_type = genomic DNA
cttctgtgatggctgctccc

SEQ ID NO: 879 - DNA, 22 bp, Homo sapiens
  source 1..22: mol_type = genomic DNA
tgtgatggctgctcccagcctg

SEQ ID NO: 880 - DNA, 22 bp, Homo sapiens
  source 1..22: mol_type = genomic DNA
gcaggatggcttctcatcgtct

SEQ ID NO: 881 - DNA, 22 bp, Homo sapiens
  source 1..22: mol_type = genomic DNA
tctagagagattagagcatcgg

SEQ ID NO: 882 - DNA, 22 bp, Homo sapiens
  source 1..22: mol_type = genomic DNA
gttgactaagtcaataatcaga

SEQ ID NO: 883 - DNA, 22 bp, Homo sapiens
  source 1..22: mol_type = genomic DNA
tatactcacttctcctgagcta

SEQ ID NO: 884 - DNA, 20 bp, Homo sapiens
  source 1..20: mol_type = genomic DNA
gaagtgagtataaaagcccc

SEQ ID NO: 885 - DNA, 20 bp, Homo sapiens
  source 1..20: mol_type = genomic DNA
gacaaggttcatatttgtat

SEQ ID NO: 886 - DNA, 20 bp, Homo sapiens
  source 1..20: mol_type = genomic DNA
gagtataaaagccccaggct

SEQ ID NO: 887 - DNA, 20 bp, Homo sapiens
  source 1..20: mol_type = genomic DNA
gagtggacttctgtgatggc

SEQ ID NO: 888 - DNA, 20 bp, Homo sapiens
  source 1..20: mol_type = genomic DNA
gatggctgctcccagcctgg

SEQ ID NO: 889 - DNA, 20 bp, Homo sapiens
  source 1..20: mol_type = genomic DNA
gcagcctagctcaggagaag

SEQ ID NO: 890 - DNA, 20 bp, Homo sapiens
  source 1..20: mol_type = genomic DNA
gctgcttatccctgccaatc

SEQ ID NO: 891 - DNA, 20 bp, Homo sapiens
  source 1..20: mol_type = genomic DNA
gggataagcagcctagctca

SEQ ID NO: 892 - DNA, 20 bp, Homo sapiens
  source 1..20: mol_type = genomic DNA
ggtttgcagtcagattggca

SEQ ID NO: 893 - DNA, 20 bp, Homo sapiens
  source 1..20: mol_type = genomic DNA
gttacttattctctctttgt

SEQ ID NO: 894 - DNA, 22 bp, Homo sapiens
  source 1..22: mol_type = genomic DNA
cttattctctctttgttgacta

SEQ ID NO: 895 - DNA, 22 bp, Homo sapiens
  source 1..22: mol_type = genomic DNA
atatttgtatgggttacttatt

SEQ ID NO: 896 - DNA, 22 bp, Homo sapiens
  source 1..22: mol_type = genomic DNA
actaagtcaataatcagaatca

SEQ ID NO: 897 - DNA, 20 bp, Homo sapiens
  source 1..20: mol_type = genomic DNA
gtttgcagtcagattggcag

SEQ ID NO: 898 - DNA, 22 bp, Homo sapiens
  source 1..22: mol_type = genomic DNA
gcagtcagattggcagggataa

SEQ ID NO: 899 - DNA, 20 bp, Homo sapiens
  source 1..20: mol_type = genomic DNA
tacaaatatgaaccttgtct

SEQ ID NO: 900 - DNA, 20 bp, Homo sapiens
  source 1..20: mol_type = genomic DNA
tactcacttctcctgagcta

SEQ ID NO: 901 - DNA, 20 bp, Homo sapiens
  source 1..20: mol_type = genomic DNA
tataaaagccccaggctggg

SEQ ID NO: 902 - DNA, 20 bp, Homo sapiens
  source 1..20: mol_type = genomic DNA
tcacttctcctgagctaggc

SEQ ID NO: 903 - DNA, 20 bp, Homo sapiens
  source 1..20: mol_type = genomic DNA
tcagattggcagggataagc

SEQ ID NO: 904 - DNA, 20 bp, Homo sapiens
  source 1..20: mol_type = genomic DNA
tcaggagaagtgagtataaa

SEQ ID NO: 905 - DNA, 21 bp, Homo sapiens
  source 1..21: mol_type = genomic DNA
tctgactgcaaacctgctgat

SEQ ID NO: 906 - DNA, 20 bp, Homo sapiens
  source 1..20: mol_type = genomic DNA
tgagctaggctgcttatccc

SEQ ID NO: 907 - DNA, 20 bp, Homo sapiens
  source 1..20: mol_type = genomic DNA
tgccaatctgactgcaaacc

SEQ ID NO: 908 - DNA, 20 bp, Homo sapiens
  source 1..20: mol_type = genomic DNA
tgctctaatctctctagaca

SEQ ID NO: 909 - DNA, 20 bp, Homo sapiens
  source 1..20: mol_type = genomic DNA
tgtgatggctgctcccagcc

SEQ ID NO: 910 - DNA, 20 bp, Homo sapiens
  source 1..20: mol_type = genomic DNA
ttggcagggataagcagcct

SEQ ID NO: 911 - DNA, 20 bp, Homo sapiens
  source 1..20: mol_type = genomic DNA
ttttatactcacttctcctg

SEQ ID NO: 912 - DNA, 23 bp, Homo sapiens
  source 1..23: mol_type = genomic DNA
caacttacccagaggcaaatggc

SEQ ID NO: 913 - DNA, 23 bp, Homo sapiens
  source 1..23: mol_type = genomic DNA
aatggctcccaggtgtcatcagc

SEQ ID NO: 914 - DNA, 23 bp, Homo sapiens
  source 1..23: mol_type = genomic DNA
ggctcccaggtgtcatcagcagc

SEQ ID NO: 915 - DNA, 23 bp, Homo sapiens
  source 1..23: mol_type = genomic DNA
ctctcataggtggtattcacagc

SEQ ID NO: 916 - DNA, 23 bp, Homo sapiens
  source 1..23: mol_type = genomic DNA
tataggaaaaccagtgagtctgg

SEQ ID NO: 917 - DNA, 23 bp, Homo sapiens
  source 1..23: mol_type = genomic DNA
tactcacctctgcatgctcatgg

SEQ ID NO: 918 - DNA, 23 bp, Homo sapiens
  source 1..23: mol_type = genomic DNA
gcaacttacccagaggcaaatgg

SEQ ID NO: 919 - DNA, 23 bp, Homo sapiens
  source 1..23: mol_type = genomic DNA
tctgtatactcacctctgcatgc

SEQ ID NO: 920 - DNA, 23 bp, Homo sapiens
  source 1..23: mol_type = genomic DNA
gaaacactcaccgtagggccagc

SEQ ID NO: 921 - DNA, 23 bp, Homo sapiens
  source 1..23: mol_type = genomic DNA
ctctacacccagggcaccggtga

SEQ ID NO: 922 - DNA, 23 bp, Homo sapiens
  source 1..23: mol_type = genomic DNA
acaccttataggaaaaccagtga

SEQ ID NO: 923 - DNA, 23 bp, Homo sapiens
  source 1..23: mol_type = genomic DNA
ataggaaaaccagtgagtctgga

SEQ ID NO: 924 - DNA, 23 bp, Homo sapiens
  source 1..23: mol_type = genomic DNA
actcacctctgcatgctcatgga

SEQ ID NO: 925 - DNA, 23 bp, Homo sapiens
  source 1..23: mol_type = genomic DNA
ctcaccgtagggccagcctcaga

SEQ ID NO: 926 - DNA, 23 bp, Homo sapiens
  source 1..23: mol_type = genomic DNA
aacctgctgattctgattattga

SEQ ID NO: 927 - DNA, 27 bp, Homo sapiens
  source 1..27: mol_type = genomic DNA
aagagagaataagtaacccatacaaat

SEQ ID NO: 928 - DNA, 27 bp, Homo sapiens
  source 1..27: mol_type = genomic DNA
aagcagcctagctcaggagaagtgagt

SEQ ID NO: 929 - DNA, 23 bp, Homo sapiens
  source 1..23: mol_type = genomic DNA
aagtccactcattcttggcagga

SEQ ID NO: 930 - DNA, 27 bp, Homo sapiens
  source 1..27: mol_type = genomic DNA
acgatgagaagccatcctgccaagaat

SEQ ID NO: 931 - DNA, 23 bp, Homo sapiens
  source 1..23: mol_type = genomic DNA
agacaaggttcatatttgtatgg

SEQ ID NO: 932 - DNA, 23 bp, Homo sapiens
  source 1..23: mol_type = genomic DNA
aggctgggagcagccatcacaga

SEQ ID NO: 933 - DNA, 23 bp, Homo sapiens
  source 1..23: mol_type = genomic DNA
ataagtaacccatacaaatatga

SEQ ID NO: 934 - DNA, 23 bp, Homo sapiens
  source 1..23: mol_type = genomic DNA
atactcacttctcctgagctagg

SEQ ID NO: 935 - DNA, 23 bp, Homo sapiens
  source 1..23: mol_type = genomic DNA
attattgacttagtcaacaaaga

SEQ ID NO: 936 - DNA, 23 bp, Homo sapiens
  source 1..23: mol_type = genomic DNA
caaatatgaaccttgtctagaga

SEQ ID NO: 937 - DNA, 27 bp, Homo sapiens
  source 1..27: mol_type = genomic DNA
cagaagtccactcattcttggcaggat

SEQ ID NO: 938 - DNA, 27 bp, Homo sapiens
  source 1..27: mol_type = genomic DNA
caggctgggagcagccatcacagaagt

SEQ ID NO: 939 - DNA, 23 bp, Homo sapiens
  source 1..23: mol_type = genomic DNA
ccatcctgccaagaatgagtgga

SEQ ID NO: 940 - DNA, 27 bp, Homo sapiens
  source 1..27: mol_type = genomic DNA
cctgctgattctgattattgacttagt

SEQ ID NO: 941 - DNA, 27 bp, Homo sapiens
  source 1..27: mol_type = genomic DNA
cgatgctctaatctctctagacaaggt

SEQ ID NO: 942 - DNA, 27 bp, Homo sapiens
  source 1..27: mol_type = genomic DNA
ctaagtcaataatcagaatcagcaggt

SEQ ID NO: 943 - DNA, 27 bp, Homo sapiens
  source 1..27: mol_type = genomic DNA
ctagacaaggttcatatttgtatgggt

SEQ ID NO: 944 - DNA, 23 bp, Homo sapiens
  source 1..23: mol_type = genomic DNA
gaaccttgtctagagagattaga

SEQ ID NO: 945 - DNA, 23 bp, Homo sapiens
  source 1..23: mol_type = genomic DNA
gaagtccactcattcttggcagg

SEQ ID NO: 946 - DNA, 23 bp, Homo sapiens
  source 1..23: mol_type = genomic DNA
gaatcagcaggtttgcagtcaga

SEQ ID NO: 947 - DNA, 23 bp, Homo sapiens
  source 1..23: mol_type = genomic DNA
gaatgagtggacttctgtgatgg

SEQ ID NO: 948 - DNA, 23 bp, Homo sapiens
  source 1..23: mol_type = genomic DNA
gactgcaaacctgctgattctga

SEQ ID NO: 949 - DNA, 27 bp, Homo sapiens
  source 1..27: mol_type = genomic DNA
gacttagtcaacaaagagagaataagt

SEQ ID NO: 950 - DNA, 23 bp, Homo sapiens
  source 1..23: mol_type = genomic DNA
gataagcagcctagctcaggaga

SEQ ID NO: 951 - DNA, 23 bp, Homo sapiens
  source 1..23: mol_type = genomic DNA
gatgagaagccatcctgccaaga

SEQ ID NO: 952 - DNA, 23 bp, Homo sapiens
  source 1..23: mol_type = genomic DNA
gccatcctgccaagaatgagtgg

SEQ ID NO: 953 - DNA, 23 bp, Homo sapiens
  source 1..23: mol_type = genomic DNA
gcttttatactcacttctcctga

SEQ ID NO: 954 - DNA, 27 bp, Homo sapiens
  source 1..27: mol_type = genomic DNA
ggataagcagcctagctcaggagaagt

SEQ ID NO: 955 - DNA, 23 bp, Homo sapiens
  source 1..23: mol_type = genomic DNA
gtctagagagattagagcatcgg

SEQ ID NO: 956 - DNA, 23 bp, Homo sapiens
  source 1..23: mol_type = genomic DNA
gtgatggctgctcccagcctggg

SEQ ID NO: 957 - DNA, 27 bp, Homo sapiens
  source 1..27: mol_type = genomic DNA
tacttattctctctttgttgactaagt

SEQ ID NO: 958 - DNA, 27 bp, Homo sapiens
  source 1..27: mol_type = genomic DNA
tattctctctttgttgactaagtcaat

SEQ ID NO: 959 - DNA, 23 bp, Homo sapiens
  source 1..23: mol_type = genomic DNA
tattgacttagtcaacaaagaga

SEQ ID NO: 960 - DNA, 27 bp, Homo sapiens
  source 1..27: mol_type = genomic DNA
tattgacttagtcaacaaagagagaat

SEQ ID NO: 961 - DNA, 27 bp, Homo sapiens
  source 1..27: mol_type = genomic DNA
tcagaatcagcaggtttgcagtcagat

SEQ ID NO: 962 - DNA, 23 bp, Homo sapiens
  source 1..23: mol_type = genomic DNA
tccactcattcttggcaggatgg

SEQ ID NO: 963 - DNA, 27 bp, Homo sapiens
  source 1..27: mol_type = genomic DNA
tctctctttgttgactaagtcaataat

SEQ ID NO: 964 - DNA, 27 bp, Homo sapiens
  source 1..27: mol_type = genomic DNA
tgagaagccatcctgccaagaatgagt

SEQ ID NO: 965 - DNA, 27 bp, Homo sapiens
  source 1..27: mol_type = genomic DNA
tgagctaggctgcttatccctgccaat

SEQ ID NO: 966 - DNA, 23 bp, Homo sapiens
  source 1..23: mol_type = genomic DNA
tgagtataaaagccccaggctgg

SEQ ID NO: 967 - DNA, 23 bp, Homo sapiens
  source 1..23: mol_type = genomic DNA
tgatggctgctcccagcctgggg

SEQ ID NO: 968 - DNA, 27 bp, Homo sapiens
  source 1..27: mol_type = genomic DNA
tgccaagaatgagtggacttctgtgat

SEQ ID NO: 969 - DNA, 27 bp, Homo sapiens
  source 1..27: mol_type = genomic DNA
tgccaatctgactgcaaacctgctgat

SEQ ID NO: 970 - DNA, 23 bp, Homo sapiens
  source 1..23: mol_type = genomic DNA
tgttgactaagtcaataatcaga

SEQ ID NO: 971 - DNA, 23 bp, Homo sapiens
  source 1..23: mol_type = genomic DNA
ttgacttagtcaacaaagagaga

SEQ ID NO: 972 - DNA, 27 bp, Homo sapiens
  source 1..27: mol_type = genomic DNA
tttgttgactaagtcaataatcagaat

SEQ ID NO: 973 - DNA, 23 bp, Homo sapiens
  source 1..23: mol_type = genomic DNA
aaaagccccaggctgggagcagc

SEQ ID NO: 974 - DNA, 23 bp, Homo sapiens
  source 1..23: mol_type = genomic DNA
aagtgagtataaaagccccaggc

SEQ ID NO: 975 - DNA, 27 bp, Homo sapiens
  source 1..27: mol_type = genomic DNA
aataatcagaatcagcaggtttgcagt

SEQ ID NO: 976 - DNA, 23 bp, Homo sapiens
  source 1..23: mol_type = genomic DNA
aatatgaaccttgtctagagaga

SEQ ID NO: 977 - DNA, 23 bp, Homo sapiens
  source 1..23: mol_type = genomic DNA
aatgagtggacttctgtgatggc

SEQ ID NO: 978 - DNA, 27 bp, Homo sapiens
  source 1..27: mol_type = genomic DNA
acaaatatgaaccttgtctagagagat

SEQ ID NO: 979 - DNA, 23 bp, Homo sapiens
  source 1..23: mol_type = genomic DNA
acagaagtccactcattcttggc

SEQ ID NO: 980 - DNA, 23 bp, Homo sapiens
  source 1..23: mol_type = genomic DNA
accttgtctagagagattagagc

SEQ ID NO: 981 - DNA, 23 bp, Homo sapiens
  source 1..23: mol_type = genomic DNA
agaagccatcctgccaagaatga

SEQ ID NO: 982 - DNA, 23 bp, Homo sapiens
  source 1..23: mol_type = genomic DNA
agcaggtttgcagtcagattggc

SEQ ID NO: 983 - DNA, 23 bp, Homo sapiens
  source 1..23: mol_type = genomic DNA
agggataagcagcctagctcagg

SEQ ID NO: 984 - DNA, 23 bp, Homo sapiens
  source 1..23: mol_type = genomic DNA
aggtttgcagtcagattggcagg

SEQ ID NO: 985 - DNA, 23 bp, Homo sapiens
  source 1..23: mol_type = genomic DNA
agtataaaagccccaggctggga

SEQ ID NO: 986 - DNA, 23 bp, Homo sapiens
  source 1..23: mol_type = genomic DNA
agtcaataatcagaatcagcagg

SEQ ID NO: 987 - DNA, 23 bp, Homo sapiens
  source 1..23: mol_type = genomic DNA
ataatcagaatcagcaggtttgc

SEQ ID NO: 988 - DNA, 26 bp, Homo sapiens
  source 1..26: mol_type = genomic DNA
attattgacttagtcaacaaagagag

SEQ ID NO: 989 - DNA, 26 bp, Homo sapiens
  source 1..26: mol_type = genomic DNA
attctctctttgttgactaagtcaat

SEQ ID NO: 990 - DNA, 26 bp, Homo sapiens
  source 1..26: mol_type = genomic DNA
attctgattattgacttagtcaacaa

SEQ ID NO: 991 - DNA, 26 bp, Homo sapiens
  source 1..26: mol_type = genomic DNA
attcttggcaggatggcttctcatcg

SEQ ID NO: 992 - DNA, 26 bp, Homo sapiens
  source 1..26: mol_type = genomic DNA
attgacttagtcaacaaagagagaat

SEQ ID NO: 993 - DNA, 26 bp, Homo sapiens
  source 1..26: mol_type = genomic DNA
attggcagggataagcagcctagctc

SEQ ID NO: 994 - DNA, 26 bp, Homo sapiens
  source 1..26: mol_type = genomic DNA
atttgtatgggttacttattctctct

SEQ ID NO: 995 - DNA, 23 bp, Homo sapiens
  source 1..23: mol_type = genomic DNA
caagaatgagtggacttctgtga

SEQ ID NO: 996 - DNA, 23 bp, Homo sapiens
  source 1..23: mol_type = genomic DNA
caatctgactgcaaacctgctga

SEQ ID NO: 997 - DNA, 23 bp, Homo sapiens
  source 1..23: mol_type = genomic DNA
cacagaagtccactcattcttgg

SEQ ID NO: 998 - DNA, 23 bp, Homo sapiens
  source 1..23: mol_type = genomic DNA
cagacgatgagaagccatcctgc

SEQ ID NO: 999 - DNA, 23 bp, Homo sapiens
  source 1..23: mol_type = genomic DNA
cagcaggtttgcagtcagattgg

SEQ ID NO: 1000 - DNA, 23 bp, Homo sapiens
  source 1..23: mol_type = genomic DNA
caggatggcttctcatcgtctgc

SEQ ID NO: 1001 - DNA, 27 bp, Homo sapiens
  source 1..27: mol_type = genomic DNA
caggtttgcagtcagattggcagggat

SEQ ID NO: 1002 - DNA, 23 bp, Homo sapiens
  source 1..23: mol_type = genomic DNA
cagtcagattggcagggataagc

SEQ ID NO: 1003 - DNA, 23 bp, Homo sapiens
  source 1..23: mol_type = genomic DNA
ccactcattcttggcaggatggc

SEQ ID NO: 1004 - DNA, 23 bp, Homo sapiens
  source 1..23: mol_type = genomic DNA
ctaagtcaataatcagaatcagc

SEQ ID NO: 1005 - DNA, 26 bp, Homo sapiens
  source 1..26: mol_type = genomic DNA
cttagtcaacaaagagagaataagta

SEQ ID NO: 1006 - DNA, 23 bp, Homo sapiens
  source 1..23: mol_type = genomic DNA
cttatccctgccaatctgactgc

SEQ ID NO: 1007 - DNA, 26 bp, Homo sapiens
  source 1..26: mol_type = genomic DNA
cttatccctgccaatctgactgcaaa

SEQ ID NO: 1008 - DNA, 26 bp, Homo sapiens
  source 1..26: mol_type = genomic DNA
cttattctctctttgttgactaagtc

SEQ ID NO: 1009 - DNA, 26 bp, Homo sapiens
  source 1..26: mol_type = genomic DNA
cttctcctgagctaggctgcttatcc

SEQ ID NO: 1010 - DNA, 23 bp, Homo sapiens
  source 1..23: mol_type = genomic DNA
cttctgtgatggctgctcccagc

SEQ ID NO: 1011 - DNA, 26 bp, Homo sapiens
  source 1..26: mol_type = genomic DNA
cttctgtgatggctgctcccagcctg

SEQ ID NO: 1012 - DNA, 26 bp, Homo sapiens
  source 1..26: mol_type = genomic DNA
cttggcaggatggcttctcatcgtct

SEQ ID NO: 1013 - DNA, 26 bp, Homo sapiens
  source 1..26: mol_type = genomic DNA
cttgtctagagagattagagcatcgg

SEQ ID NO: 1014 - DNA, 26 bp, Homo sapiens
  source 1..26: mol_type = genomic DNA
ctttgttgactaagtcaataatcaga

SEQ ID NO: 1015 - DNA, 26 bp, Homo sapiens
  source 1..26: mol_type = genomic DNA
cttttatactcacttctcctgagcta

SEQ ID NO: 1016 - DNA, 23 bp, Homo sapiens
  source 1..23: mol_type = genomic DNA
gaagtgagtataaaagccccagg

SEQ ID NO: 1017 - DNA, 23 bp, Homo sapiens
  source 1..23: mol_type = genomic DNA
gacaaggttcatatttgtatggg

SEQ ID NO: 1018 - DNA, 23 bp, Homo sapiens
  source 1..23: mol_type = genomic DNA
gagtataaaagccccaggctggg

SEQ ID NO: 1019 - DNA, 23 bp, Homo sapiens
  source 1..23: mol_type = genomic DNA
gagtggacttctgtgatggctgc

SEQ ID NO: 1020 - DNA, 23 bp, Homo sapiens
  source 1..23: mol_type = genomic DNA
gatggctgctcccagcctggggc

SEQ ID NO: 1021 - DNA, 23 bp, Homo sapiens
  source 1..23: mol_type = genomic DNA
gcagcctagctcaggagaagtga

SEQ ID NO: 1022 - DNA, 23 bp, Homo sapiens
  source 1..23: mol_type = genomic DNA
gctgcttatccctgccaatctga

SEQ ID NO: 1023 - DNA, 23 bp, Homo sapiens
  source 1..23: mol_type = genomic DNA
gggataagcagcctagctcagga

SEQ ID NO: 1024 - DNA, 23 bp, Homo sapiens
  source 1..23: mol_type = genomic DNA
ggtttgcagtcagattggcaggg

SEQ ID NO: 1025 - DNA, 23 bp, Homo sapiens
  source 1..23: mol_type = genomic DNA
gttacttattctctctttgttga

SEQ ID NO: 1026 - DNA, 26 bp, Homo sapiens
  source 1..26: mol_type = genomic DNA
gttacttattctctctttgttgacta

SEQ ID NO: 1027 - DNA, 26 bp, Homo sapiens
  source 1..26: mol_type = genomic DNA
gttcatatttgtatgggttacttatt

SEQ ID NO: 1028 - DNA, 26 bp, Homo sapiens
  source 1..26: mol_type = genomic DNA
gttgactaagtcaataatcagaatca

SEQ ID NO: 1029 - DNA, 23 bp, Homo sapiens
  source 1..23: mol_type = genomic DNA
gtttgcagtcagattggcaggga

SEQ ID NO: 1030 - DNA, 26 bp, Homo sapiens
  source 1..26: mol_type = genomic DNA
gtttgcagtcagattggcagggataa

SEQ ID NO: 1031 - DNA, 23 bp, Homo sapiens
  source 1..23: mol_type = genomic DNA
tacaaatatgaaccttgtctaga

SEQ ID NO: 1032 - DNA, 23 bp, Homo sapiens
  source 1..23: mol_type = genomic DNA
tactcacttctcctgagctaggc

SEQ ID NO: 1033 - DNA, 23 bp, Homo sapiens
  source 1..23: mol_type = genomic DNA
tataaaagccccaggctgggagc

SEQ ID NO: 1034 - DNA, 23 bp, Homo sapiens
  source 1..23: mol_type = genomic DNA
tcacttctcctgagctaggctgc

SEQ ID NO: 1035 - DNA, 23 bp, Homo sapiens
  source 1..23: mol_type = genomic DNA
tcagattggcagggataagcagc

SEQ ID NO: 1036 - DNA, 23 bp, Homo sapiens
  source 1..23: mol_type = genomic DNA
tcaggagaagtgagtataaaagc

SEQ ID NO: 1037 - DNA, 27 bp, Homo sapiens
  source 1..27: mol_type = genomic DNA
tctgactgcaaacctgctgattctgat

SEQ ID NO: 1038 - DNA, 23 bp, Homo sapiens
  source 1..23: mol_type = genomic DNA
tgagctaggctgcttatccctgc

SEQ ID NO: 1039 - DNA, 23 bp, Homo sapiens
  source 1..23: mol_type = genomic DNA
tgccaatctgactgcaaacctgc

SEQ ID NO: 1040 - DNA, 23 bp, Homo sapiens
  source 1..23: mol_type = genomic DNA
tgctctaatctctctagacaagg

SEQ ID NO: 1041 - DNA, 23 bp, Homo sapiens
  source 1..23: mol_type = genomic DNA
tgtgatggctgctcccagcctgg

SEQ ID NO: 1042 - DNA, 23 bp, Homo sapiens
  source 1..23: mol_type = genomic DNA
ttggcagggataagcagcctagc

SEQ ID NO: 1043 - DNA, 23 bp, Homo sapiens
  source 1..23: mol_type = genomic DNA
ttttatactcacttctcctgagc

SEQ ID NO: 1044 - RNA, 100 nt, synthetic construct
  source 1..100: mol_type = other RNA
gccatcctgccaagaacgaggttttagagctagaaatagcaagttaaaataaggctagtccgttatcaacttgaaaaagtggcaccgagtcggtgctttt

SEQ ID NO: 1045 - RNA, 100 nt, synthetic construct; identical to SEQ ID NO: 477
  source 1..100: mol_type = other RNA

SEQ ID NO: 1046 - DNA, 33 bp, synthetic construct
  source 1..33: mol_type = other DNA
acactctttccctacacgacgctcttccgatct

SEQ ID NO: 1047 - DNA, 34 bp, synthetic construct
  source 1..34: mol_type = other DNA
gtgactggagttcagacgtgtgctcttccgatct

SEQ ID NO: 1048 - DNA, 20 bp, synthetic construct
  source 1..20: mol_type = other DNA
gccatcctaccaggaatgaa

SEQ ID NO: 1049 - DNA, 20 bp, synthetic construct
  source 1..20: mol_type = other DNA
gccatcttgccaagaaaaag

SEQ ID NO: 1050 - DNA, 21 bp, synthetic construct
  source 1..21: mol_type = other DNA
gccatacctgccatgaatgag

SEQ ID NO: 1051 - DNA, 20 bp, synthetic construct
  source 1..20: mol_type = other DNA
gccatcctgacaggaatgag

SEQ ID NO: 1052 - DNA, 20 bp, synthetic construct
  source 1..20: mol_type = other DNA
accatcctgcaaagaatgat

SEQ ID NO: 1053 - DNA, 19 bp, synthetic construct
  source 1..19: mol_type = other DNA
gccatccaataagaatgag

SEQ ID NO: 1054 - DNA, 20 bp, synthetic construct
  source 1..20: mol_type = other DNA
gccatcctgacaagtatgag

SEQ ID NO: 1055 - DNA, 20 bp, synthetic construct
  source 1..20: mol_type = other DNA
ccatacctgccaagaatgaa

SEQ ID NO: 1056 - DNA, 20 bp, synthetic construct
  source 1..20: mol_type = other DNA
tgcatcctgccaaaaatggg

SEQ ID NO: 1057 - DNA, 20 bp, synthetic construct
  source 1..20: mol_type = other DNA
tgcatcctgccaagaagaag

SEQ ID NO: 1058 - DNA, 19 bp, synthetic construct
  source 1..19: mol_type = other DNA
gccatcctccaagaatgct

SEQ ID NO: 1059 - DNA, 18 bp, synthetic construct
  source 1..18: mol_type = other DNA
gccatctgcaagaaggag

SEQ ID NO: 1060 - DNA, 20 bp, synthetic construct
  source 1..20: mol_type = other DNA
gccatcctatcaagaataaa

SEQ ID NO: 1061 - DNA, 19 bp, synthetic construct
  source 1..19: mol_type = other DNA
tccatcctgtaagaatgag

SEQ ID NO: 1062 - DNA, 20 bp, synthetic construct
  source 1..20: mol_type = other DNA
ggccatctgccaagaaggat

SEQ ID NO: 1063 - DNA, 20 bp, synthetic construct
  source 1..20: mol_type = other DNA
accatcctgccagcaatgtg

SEQ ID NO: 1064 - DNA, 20 bp, synthetic construct
  source 1..20: mol_type = other DNA
tccatcctactaagaatgag

SEQ ID NO: 1065 - DNA, 20 bp, synthetic construct
  source 1..20: mol_type = other DNA
ggtatcctgccaagaatgga

SEQ ID NO: 1066 - DNA, 20 bp, synthetic construct
  source 1..20: mol_type = other DNA
tccatcctgccaagaattgc

SEQ ID NO: 1067 - DNA, 18 bp, synthetic construct
  source 1..18: mol_type = other DNA
gccatctgcaagaatgag

SEQ ID NO: 1068 - DNA, 19 bp, synthetic construct
  source 1..19: mol_type = other DNA
gccatcctgcaaatatgag

SEQ ID NO: 1069 - DNA, 20 bp, synthetic construct
  source 1..20: mol_type = other DNA
accatcctgtcaagaatcaa

SEQ ID NO: 1070 - DNA, 20 bp, synthetic construct
  source 1..20: mol_type = other DNA
gccatactaacaagaatgag

SEQ ID NO: 1071 - DNA, 20 bp, synthetic construct
  source 1..20: mol_type = other DNA
gtgatcctgccaggaataag

SEQ ID NO: 1072 - DNA, 19 bp, synthetic construct
  source 1..19: mol_type = other DNA
gccatcaagcaagaatgag

SEQ ID NO: 1073 - DNA, 20 bp, synthetic construct
  source 1..20: mol_type = other DNA
gccatcctcacaagtatgag

SEQ ID NO: 1074 - DNA, 19 bp, synthetic construct
  source 1..19: mol_type = other DNA
accatccagcaagaatgag

SEQ ID NO: 1075 - DNA, 19 bp, synthetic construct
  source 1..19: mol_type = other DNA
gccatatgccaaaaaggag

SEQ ID NO: 1076 - DNA, 20 bp, synthetic construct
  source 1..20: mol_type = other DNA
gacatcctgtcaaggatcag

SEQ ID NO: 1077 - DNA, 18 bp, synthetic construct
  source 1..18: mol_type = other DNA
gccatagccaaaaatgaa

SEQ ID NO: 1078 - DNA, 20 bp, synthetic construct
  source 1..20: mol_type = other DNA
gccataagccaaagaatgac

SEQ ID NO: 1079 - DNA, 20 bp, synthetic construct
  source 1..20: mol_type = other DNA
gccatcctaacaagtatgag

SEQ ID NO: 1080 - DNA, 19 bp, synthetic construct
  source 1..19: mol_type = other DNA
catatcctgccagaatgag

SEQ ID NO: 1081 - DNA, 21 bp, synthetic construct
  source 1..21: mol_type = other DNA
tacatcctaccaaggaatcag

SEQ ID NO: 1082 - DNA, 20 bp, synthetic construct
  source 1..20: mol_type = other DNA
cccatcctgccaagaagtgt

SEQ ID NO: 1083 - DNA, 19 bp, synthetic construct
  source 1..19: mol_type = other DNA
gccatcctacaaaaatgag

SEQ ID NO: 1084 - DNA, 20 bp, synthetic construct
  source 1..20: mol_type = other DNA
gtcatcctgccaggaatgaa

SEQ ID NO: 1085 - DNA, 21 bp, synthetic construct
  source 1..21: mol_type = other DNA
gccatatctgccaagaatgcg

SEQ ID NO: 1086 - DNA, 20 bp, synthetic construct
  source 1..20: mol_type = other DNA
tccatcctgtcaagaatgtg

SEQ ID NO: 1087 - DNA, 18 bp, synthetic construct
  source 1..18: mol_type = other DNA
tccatcctccagaatgag

SEQ ID NO: 1088 - DNA, 20 bp, synthetic construct
  source 1..20: mol_type = other DNA
gccatgctgccaagaatgat

SEQ ID NO: 1089 - DNA, 19 bp, synthetic construct
  source 1..19: mol_type = other DNA
gctatcctgccagaatgag

SEQ ID NO: 1090 - DNA, 20 bp, synthetic construct
  source 1..20: mol_type = other DNA
tgcatcctgacaagaaatag

SEQ ID NO: 1091 - DNA, 18 bp, synthetic construct
  source 1..18: mol_type = other DNA
tccatagccaagaatgag

SEQ ID NO: 1092 - DNA, 19 bp, synthetic construct
  source 1..19: mol_type = other DNA
accatctgtcaagaatgag

SEQ ID NO: 1093 - DNA, 20 bp, synthetic construct
  source 1..20: mol_type = other DNA
gccatcccgccaggaattat

SEQ ID NO: 1094 - DNA, 20 bp, synthetic construct
  source 1..20: mol_type = other DNA
accatccttccaagaagatg

SEQ ID NO: 1095 - DNA, 20 bp, synthetic construct
  source 1..20: mol_type = other DNA
acaaattacccagaggaaaa

SEQ ID NO: 1096 - DNA, 20 bp, synthetic construct
  source 1..20: mol_type = other DNA
tcaacttacccagagtcaaa

SEQ ID NO: 1097 - DNA, 20 bp, synthetic construct
  source 1..20: mol_type = other DNA
gcaacttgcccagaggcaca

SEQ ID NO: 1098 - DNA, 20 bp, synthetic construct
  source 1..20: mol_type = other DNA
gcaacatacccagtggcaaa

SEQ ID NO: 1099 - DNA, 20 bp, synthetic construct
  source 1..20: mol_type = other DNA
gcagcctacccagaggcaaa

SEQ ID NO: 1100 - DNA, 20 bp, synthetic construct
  source 1..20: mol_type = other DNA
gcaactcccccagaggcaaa

SEQ ID NO: 1101 - DNA, 20 bp, synthetic construct
  source 1..20: mol_type = other DNA
tagaggaaaaccagtcagtc

SEQ ID NO: 1102 - DNA, 20 bp, synthetic construct
  source 1..20: mol_type = other DNA
cataggaaaaccagtgagtt

SEQ ID NO: 1103 - DNA, 20 bp, synthetic construct
  source 1..20: mol_type = other DNA
taaaggaaaaccagtgggtc

SEQ ID NO: 1104 - DNA, 20 bp, synthetic construct
  source 1..20: mol_type = other DNA
tacacaactgtgcatgctca

SEQ ID NO: 1105 - DNA, 20 bp, synthetic construct
  source 1..20: mol_type = other DNA
tattcacctctgcatgctct

SEQ ID NO: 1106 - DNA, 20 bp, synthetic construct
  source 1..20: mol_type = other DNA
tacttacctctgcttgctca

SEQ ID NO: 1107 - DNA, 20 bp, synthetic construct
  source 1..20: mol_type = other DNA
tacacacctctacatgctca

SEQ ID NO: 1108 - DNA, 23 bp, Homo sapiens
  source 1..23: mol_type = genomic DNA
tgcatcctgccaaaaatggggag

SEQ ID NO: 1109 - DNA, 23 bp, Homo sapiens
  source 1..23: mol_type = genomic DNA
gccatcttgccaagaaaaagggg

SEQ ID NO: 1110 - DNA, 22 bp, Homo sapiens
  source 1..22: mol_type = genomic DNA
aacatcctgcaagaataagaag

SEQ ID NO: 1111 - DNA, 22 bp, Homo sapiens
  source 1..22: mol_type = genomic DNA
gccatccaataagaatgagtgg

SEQ ID NO: 1112 - DNA, 23 bp, Homo sapiens
  source 1..23: mol_type = genomic DNA
gtcatcctgccaaaataaggagg

SEQ ID NO: 1113 - DNA, 23 bp, Homo sapiens
  source 1..23: mol_type = genomic DNA
cccatacagccaagaatgagaaa

SEQ ID NO: 1114 - DNA, 23 bp, Homo sapiens
  source 1..23: mol_type = genomic DNA
tccatcctactaagaatgaggag

SEQ ID NO: 1115 - DNA, 23 bp, Homo sapiens
  source 1..23: mol_type = genomic DNA
accatcctgacaagtgtgaggca

SEQ ID NO: 1116 - DNA, 23 bp, Homo sapiens
  source 1..23: mol_type = genomic DNA
gtgatcctgccaggaataaggag

SEQ ID NO: 1117 - DNA, 22 bp, Homo sapiens
  source 1..22: mol_type = genomic DNA
gccaccctccaaggatctgagg

SEQ ID NO: 1118 - DNA, 23 bp, Homo sapiens
  source 1..23: mol_type = genomic DNA
gccatactaacaagaatgaggtg

SEQ ID NO: 1119 - DNA, 21 bp, Homo sapiens
  source 1..21: mol_type = genomic DNA
gccatcctcaagaatgggaaa

SEQ ID NO: 1120 - DNA, 23 bp, Homo sapiens
  source 1..23: mol_type = genomic DNA
accatcctgtcaagaatcaagag

SEQ ID NO: 1121 - DNA, 21 bp, Homo sapiens
  source 1..21: mol_type = genomic DNA
gccaacctgacaaatgtgagg

SEQ ID NO: 1122 - DNA, 23 bp, Homo sapiens
  source 1..23: mol_type = genomic DNA
accatccttccaagaagatgggg

SEQ ID NO: 1123 - DNA, 23 bp, Homo sapiens
  source 1..23: mol_type = genomic DNA
gccatccagccaagcaagaaggg

SEQ ID NO: 1124 - DNA, 24 bp, Homo sapiens
  source 1..24: mol_type = genomic DNA
gtcatcactgccaagaacaagagg

SEQ ID NO: 1125 - DNA, 22 bp, Homo sapiens
  source 1..22: mol_type = genomic DNA
gccatcctgtaagaataaggat

SEQ ID NO: 1126 - DNA, 23 bp, Homo sapiens
  source 1..23: mol_type = genomic DNA
accatcctgccagcaatgtgagg

SEQ ID NO: 1127 - DNA, 21 bp, Homo sapiens
  source 1..21: mol_type = genomic DNA
tccatcctgaagaatgaatag

SEQ ID NO: 1128 - DNA, 24 bp, Homo sapiens
  source 1..24: mol_type = genomic DNA
gccatatctgccaagaatgcggag

SEQ ID NO: 1129 - DNA, 23 bp, Homo sapiens
  source 1..23: mol_type = genomic DNA
gatatcctcacaagaatgagtga

SEQ ID NO: 1130 - DNA, 21 bp, Homo sapiens
  source 1..21: mol_type = genomic DNA
gctctactgccaagaaagtgg

SEQ ID NO: 1131 - DNA, 22 bp, Homo sapiens
  source 1..22: mol_type = genomic DNA
gccatccaccaagaaagcggag

SEQ ID NO: 1132 - DNA, 23 bp, Homo sapiens
  source 1..23: mol_type = genomic DNA
tataagaaaaccagtgtctctgg

SEQ ID NO: 1133 - DNA, 22 bp, Homo sapiens
  source 1..22: mol_type = genomic DNA
tatagtgaaccagtgaggcagg

SEQ ID NO: 1134 - DNA, 23 bp, Homo sapiens
  source 1..23: mol_type = genomic DNA
tgtagaaaaaccagtgaataaga

SEQ ID NO: 1135 - DNA, 22 bp, Homo sapiens
  source 1..22: mol_type = genomic DNA
gataggaaaaccatgagggggt

SEQ ID NO: 1136 - DNA, 22 bp, Homo sapiens
  source 1..22: mol_type = genomic DNA
tataggaaaccaatgagtgctg

SEQ ID NO: 1137 - DNA, 21 bp, Homo sapiens
  source 1..21: mol_type = genomic DNA
tataggtaaaccagagtaggc

SEQ ID NO: 1138 - DNA, 23 bp, Homo sapiens
  source 1..23: mol_type = genomic DNA
agtaggaaaaccagtatataggg

SEQ ID NO: 1139 - DNA, 21 bp, Homo sapiens
  source 1..21: mol_type = genomic DNA
aataggaaaaccattttcagg

SEQ ID NO: 1140 - DNA, 23 bp, Homo sapiens
  source 1..23: mol_type = genomic DNA
aataggaaaaccagtaaaatagg

SEQ ID NO: 1141 - DNA, 22 bp, Homo sapiens
  source 1..22: mol_type = genomic DNA
catacgaagtccatgagtcagg

SEQ ID NO: 1142 - DNA, 23 bp, Homo sapiens
  source 1..23: mol_type = genomic DNA
atatggaaaaccagagaatcagg

SEQ ID NO: 1143 - DNA, 22 bp, Homo sapiens
  source 1..22: mol_type = genomic DNA
gatagaaacaccatgaatcagg

SEQ ID NO: 1144 - DNA, 22 bp, Homo sapiens
  source 1..22: mol_type = genomic DNA
tatatgaaaccagtaagtttgg

SEQ ID NO: 1145 - DNA, 25 bp, Homo sapiens
  source 1..25: mol_type = genomic DNA
tataggtgtaaaccagtgtgcctag

SEQ ID NO: 1146 - DNA, 23 bp, Homo sapiens
  source 1..23: mol_type = genomic DNA
tataggagaaacagtgaatagga

SEQ ID NO: 1147 - DNA, 23 bp, Homo sapiens
  source 1..23: mol_type = genomic DNA
aaaatgtaaaccagtaagcccgg

SEQ ID NO: 1148 - DNA, 24 bp, Homo sapiens
  source 1..24: mol_type = genomic DNA
tgtaggaagaaccagtggatcggg

SEQ ID NO: 1149 - DNA, 22 bp, Homo sapiens
  source 1..22: mol_type = genomic DNA
aaaaggaaagccagtgacctgg

SEQ ID NO: 1150 - DNA, 23 bp, Homo sapiens
  source 1..23: mol_type = genomic DNA
aaatagaaaaccagtaagtcatg

SEQ ID NO: 1151 - DNA, 22 bp, Homo sapiens
  source 1..22: mol_type = genomic DNA
tataggaaaacaggaactctgg

SEQ ID NO: 1152 - DNA, 23 bp, Homo sapiens
  source 1..23: mol_type = genomic DNA
tataataaaaccagtgataaggg

SEQ ID NO: 1153 - DNA, 22 bp, Homo sapiens
  source 1..22: mol_type = genomic DNA
tgtaggaaaacatatgatcagg

SEQ ID NO: 1154 - DNA, 23 bp, Homo sapiens
  source 1..23: mol_type = genomic DNA
aataggataaccagtcagtaggg

SEQ ID NO: 1155 - DNA, 23 bp, Homo sapiens
  source 1..23: mol_type = genomic DNA
tataacataaccaataggtcagg

SEQ ID NO: 1156 - DNA, 23 bp, Homo sapiens
  source 1..23: mol_type = genomic DNA
tactcacctctacatgctcagtg

SEQ ID NO: 1157 - DNA, 24 bp, Homo sapiens
  source 1..24: mol_type = genomic DNA
tacagcacctctgcattgccaggg

SEQ ID NO: 1158 - DNA, 23 bp, Homo sapiens
  source 1..23: mol_type = genomic DNA
tattcacctctgcatctccaggg

SEQ ID NO: 1159 - DNA, 22 bp, Homo sapiens
  source 1..22: mol_type = genomic DNA
ctctcacctctgcatgacaagc

SEQ ID NO: 1160 - DNA, 22 bp, Homo sapiens
  source 1..22: mol_type = genomic DNA
tactcacaatgcatgctaaagg

SEQ ID NO: 1161 - DNA, 23 bp, Homo sapiens
  source 1..23: mol_type = genomic DNA
tactcacctctgccttcctttgt

SEQ ID NO: 1162 - DNA, 22 bp, Homo sapiens
  source 1..22: mol_type = genomic DNA
ttatcaccctgcatgttcaggg

SEQ ID NO: 1163 - DNA, 22 bp, Homo sapiens
  source 1..22: mol_type = genomic DNA
tactgacctttccatctcactg

SEQ ID NO: 1164 - DNA, 22 bp, Homo sapiens
  source 1..22: mol_type = genomic DNA
tactcactcagcatgttcagag

SEQ ID NO: 1165 - DNA, 22 bp, Homo sapiens
  source 1..22: mol_type = genomic DNA
gaataacctctgatggtcaagg

SEQ ID NO: 1166 - DNA, 23 bp, Homo sapiens
  source 1..23: mol_type = genomic DNA
tattcacctctgcatgctctgag

SEQ ID NO: 1167 - DNA, 22 bp, Homo sapiens
  source 1..22: mol_type = genomic DNA
tattcagcaatgcatgtcaagg

SEQ ID NO: 1168 - DNA, 22 bp, Homo sapiens
  source 1..22: mol_type = genomic DNA
tacttaccttacatgttcaagg

SEQ ID NO: 1169 - DNA, 22 bp, Homo sapiens
  source 1..22: mol_type = genomic DNA
tactcaactctgctgctatagc

SEQ ID NO: 1170 - DNA, 22 bp, Homo sapiens
  source 1..22: mol_type = genomic DNA
tactcaactctgctgctctagg

SEQ ID NO: 1171 - DNA, 22 bp, Homo sapiens
  source 1..22: mol_type = genomic DNA
tactaaccttgccagctgaggg

SEQ ID NO: 1172 - DNA, 22 bp, Homo sapiens
  source 1..22: mol_type = genomic DNA
tgctcaccccacatgctcatgg

SEQ ID NO: 1173 - DNA, 23 bp, Homo sapiens
  source 1..23: mol_type = genomic DNA
ttttctactctgcataatcatgg

SEQ ID NO: 1174 - DNA, 23 bp, Homo sapiens
  source 1..23: mol_type = genomic DNA
acctcacctctgcctgctctggg

SEQ ID NO: 1175 - DNA, 21 bp, Homo sapiens
  source 1..21: mol_type = genomic DNA
tactcaactgcattctcaggg

SEQ ID NO: 1176 - DNA, 22 bp, Homo sapiens
  source 1..22: mol_type = genomic DNA
cactcacactacatgctcttgg

SEQ ID NO: 1177 - DNA, 25 bp, Homo sapiens
  source 1..25: mol_type = genomic DNA
tccacacctctcggcaagctgaggg

SEQ ID NO: 1178 - DNA, 23 bp, Homo sapiens
  source 1..23: mol_type = genomic DNA
tatatacctctgcatgttcagag

SEQ ID NO: 1179 - DNA, 23 bp, Homo sapiens
  source 1..23: mol_type = genomic DNA
tagacacataagcatgctcacag

SEQ ID NO: 1180 - RNA, 4929 nt, synthetic construct
  source 1..4929: mol_type = other RNA
atgagcgaggtggagttcagccacgagtactggatgcggcacgccctgaccctggccaagcgggcccgggacgagcgggaggtgcccgtgggcgccgtgctggtgctgaacaaccgggtgatcggcgagggctggaaccgggccatcggcctgcacgaccccaccgcccacgccgagatcatggccctgcggcagggcggcctggtgatgcagaactaccggctgatcgacgccaccctgtacgtgaccttcgagccctgcgtgatgtgcgccggcgccatgatccacagccggatcggccgggtggtgttcggcgtgcggaacgccaagaccggcgccgccggcagcctgatggacgtgctgcaccaccccggcatgaaccaccgggtggagatcaccgagggcatcctggccgacgagtgcgccgccctgctgtgccggttcttccggatgccccggcgggtgttcaacgcccagaagaaggcccagagcagcaccgacaggaaataagagagaaaagaagagtaagaagaaatataagagccaccagcggcggcagcagcggcggcagcagcggcagcgagacacccggcaccagcgagagcgccacccccgagagcagcggcggcagcagcggcggcagcgacaagaagtacagcatcggcctggccatcggcaccaacagcgtgggctgggccgtgatcaccgacgagtacaaggtgcccagcaagaagttcaaggtgctgggcaacaccgaccggcacagcatcaagaagaacctgatcggcgccctgctgttcgacagcggcgagacagccgaggccacccggctgaagcggaccgcccggcggcggtacacccggcggaagaaccggatctgctacctgcaggagatcttcagcaacgagatggccaaggtggacgacagcttcttccaccggctggaggagagcttcctggtggaggaggacaagaagcacgagcggcaccccatcttcggcaacatcgtggacgaggtggcctaccacgagaagtaccccaccatctaccacctgcggaagaagctggtggacagcaccgacaaggccgacctgcggctgatctacctggccctggcccacatgatcaagttccggggccacttcctgatcgagggcgacctgaaccccgacaacagcgacgtggacaagctgttcatccagctggtgcagacctacaaccagctgttcgaggagaaccccatcaacgccagcggcgtggacgccaaggccatcctgagcgcccggctgagcaagagccggcggctggagaacctgatcgcccagctgcccggcgagaagaagaacggcctgttcggcaacctgatcgccctgagcctgggcctgacccccaacttcaagagcaacttcgacctggccgaggacgccaagctgcagctgagcaaggacacctacgacgacgacctggacaacctgctggcccagatcggcgaccagtacgccgacctgttcctggccgccaagaacctgagcgacgccatcctgctgagcgacatcctgcgggtgaacaccgagatcaccaaggcccccctgagcgccagcatgatcaagcggtacgacgagcaccaccaggacctgaccctgctgaaggccctggtgcggcagcagctgcccgagaagtacaaggagatcttcttcgaccagagcaagaacggctacgccggctacatcgacggcggcgccagccaggaggagttctacaagttcatcaagcccatcctggagaagatggacggcaccgaggagctgctggtgaagctgaaccgggaggacctgctgcggaagcagcggaccttcgacaacggcagcatcccccaccagatccacctgggcgagctgcacgccatcctgcggcggcaggaggacttctaccccttcctgaaggacaaccgggagaagatcgagaagatcctgaccttccggatcccctactacgtgggccccctggcccggggcaacagccggttcgcctggatgacccgcaagagcgaggagacaatcaccccctggaacttcgaggaggtggtggacaagggcgccagcgcccagagcttcatcgagcggatgaccaacttcgacaagaacctgcccaacgagaaggtgctgcccaagcacagcctgctgtacgagtacttcaccgtgtacaacgagctgaccaaggtgaagtacgtgaccgagggcatgcggaagcccgccttcctgagcggcgagcagaagaaggccatcgtggacctgctgttcaagaccaaccggaaggtgaccgtgaagcagctgaaggaggactacttcaagaagatcgagtgcttcgacagcgtggagatcagcggcgtggaggaccggttcaacgccagcctgggcacctaccacgacctgctgaagatcatcaaggacaaggacttcctggacaacgaggagaacgaggacatcctggaggacatcgtgctgaccctgaccctgttcgaggaccgggagatgatcgaggagcggctgaagacctacgcccacctgttcgacgacaaggtgatgaagcagctgaagcggcggcggtacaccggctggggccggctgagccggaagctgatcaacggcatccgggacaagcagagcggcaagaccatcctggacttcctcaagagcgacggcttcgccaaccggaacttcatgcagctgatccacgacgacagcctgaccttcaaggaggacatccagaaggcccaggtgagcggccagggcgacagcctgcacgagcacatcgccaacctggccggcagccccgccatcaagaagggcatcctgcagaccgtgaaggtggtggacgagctggtgaaggtgatgggccggcacaagcccgagaacatcgtgatcgagatggcccgggagaaccagaccacccagaagggccagaagaacagccgggagcggatgaagcggatcgaggagggcatcaaggagctgggcagccagatcctgaaggagcaccccgtggagaacacccagctgcagaacgagaagctgtacctgtactacctgcagaacggccgggacatgtacgtggaccaggagctggacatcaaccggctgagcgactacgacgtggaccacatcgtgccccagagcttcctgaaggacgacagcatcgacaacaaggtgctgacccggagcgacaagaaccggggcaagagcgacaacgtgcccagcgaggaggtggtgaagaagatgaagaactactggcggcagctgctgaacgccaagctgatcacccagcggaagttcgacaacctgaccaaggccgagcggggcggcctgagcgagctggacaaggccggcttcatcaagcggcagctggtggagacacggcagatcaccaagcacgtggcccagatcctggacagccggatgaacaccaagtacgacgagaacgacaagctgatccgggaggtgaaggtgatcaccctcaagagcaagctggtgagcgacttccggaaggacttccagttctacaaggtgcgggagatcaacaactaccaccacgcccacgacgcctacctgaacgccgtggtgggcaccgccctgatcaagaagtaccccaagctggagagcgagttcgtgtacggcgactacaaggtgtacgacgtgcggaagatgatcgccaagagcgagcaggagatcggcaaggccaccgccaagtacttcttctacagcaacatcatgaacttcttcaagaccgagatcaccctggccaacggcgagatccggaagcggcccctgatcgagacaaacggcgagacaggcgagatcgtgtgggacaagggccgggacttcgccaccgtgcggaaggtgctgagcatgccccaggtgaacatcgtgaagaagaccgaggtgcagaccggcggcttcagcaaggagagcatcctgcccaagcggaacagcgacaagctgatcgcccggaagaaggactgggaccccaagaagtacggcggcttcgacagccccaccgtggcctacagcgtgctggtggtggccaaggtggagaagggcaagagcaagaagctcaagagcgtgaaggagctgctgggcatcaccatcatggagcggagcagcttcgagaagaaccccatcgacttcctggaggccaagggctacaaggaggtgaagaaggacctgatcatcaagctgcccaagtacagcctgttcgagctggagaacggccggaagcggatgctggccagcgccggcgagctgcagaagggcaacgagctggccctgcccagcaagtacgtgaacttcctgtacctggccagccactacgagaagctgaagggcagccccgaggacaacgagcagaagcagctgttcgtggagcagcacaagcactacctggacgagatcatcgagcagatcagcgagttcagcaagcgggtgatcctggccgacgccaacctggacaaggtgctgagcgcctacaacaagcaccgggacaagcccatccgggagcaggccgagaacatcatccacctgttcaccctgaccaacctgggcgcccccgccgccttcaagtacttcgacaccaccatcgaccggaagcggtacaccagcaccaaggaggtgctggacgccaccctgatccaccagagcatcaccggcctgtacgagacacggatcgacctgagccagctgggcggcgacgagggcgccgacaagcggaccgccgacggcagcgagttcgagagccccaagaagaagcggaaggtgtgagcggccgcttaattaagctgccttctgcggggcttgccttctggccatgcccttcttctctcccttgcacctgtacctcttggtctttgaataaagcctgagtaggaagtctaga

SEQ ID NO: 1181 - protein, 1588 aa, synthetic construct; identical to SEQ ID NO: 333

SEQ ID NO: 1182 - RNA, 47 nt, synthetic construct
  source 1..47: mol_type = other RNA
aggaaataagagagaaaagaagagtaagaagaaatataagagccacc

SEQ ID NO: 1183 - RNA, 501 nt, synthetic construct
  source 1..501: mol_type = other RNA
atgagcgaggtggagttcagccacgagtactggatgcggcacgccctgaccctggccaagcgggcccgggacgagcgggaggtgcccgtgggcgccgtgctggtgctgaacaaccgggtgatcggcgagggctggaaccgggccatcggcctgcacgaccccaccgcccacgccgagatcatggccctgcggcagggcggcctggtgatgcagaactaccggctgatcgacgccaccctgtacgtgaccttcgagccctgcgtgatgtgcgccggcgccatgatccacagccggatcggccgggtggtgttcggcgtgcggaacgccaagaccggcgccgccggcagcctgatggacgtgctgcaccaccccggcatgaaccaccgggtggagatcaccgagggcatcctggccgacgagtgcgccgccctgctgtgccggttcttccggatgccccggcgggtgttcaacgcccagaagaaggcccagagcagcaccgac

SEQ ID NO: 1184 - protein, 167 aa, synthetic construct
MSEVEFSHEYWMRHALTLAKRARDEREVPVGAVLVLNNRVIGEGWNRAIGLHDPTAHAEIMALRQGGLVMQNYRLIDATLYVTFEPCVMCAGAMIHSRIGRVVFGVRNAKTGAAGSLMDVLHHPGMNHRVEITEGILADECAALLCRFFRMPRRVFNAQKKAQSSTD

SEQ ID NO: 1185 - RNA, 96 nt, synthetic construct
  source 1..96: mol_type = other RNA
agcggcggcagcagcggcggcagcagcggcagcgagacacccggcaccagcgagagcgccacccccgagagcagcggcggcagcagcggcggcagc

SEQ ID NO: 1186 - RNA, 4101 nt, synthetic construct
  source 1..4101: mol_type = other RNA
gacaagaagtacagcatcggcctggccatcggcaccaacagcgtgggctgggccgtgatcaccgacgagtacaaggtgcccagcaagaagttcaaggtgctgggcaacaccgaccggcacagcatcaagaagaacctgatcggcgccctgctgttcgacagcggcgagacagccgaggccacccggctgaagcggaccgcccggcggcggtacacccggcggaagaaccggatctgctacctgcaggagatcttcagcaacgagatggccaaggtggacgacagcttcttccaccggctggaggagagcttcctggtggaggaggacaagaagcacgagcggcaccccatcttcggcaacatcgtggacgaggtggcctaccacgagaagtaccccaccatctaccacctgcggaagaagctggtggacagcaccgacaaggccgacctgcggctgatctacctggccctggcccacatgatcaagttccggggccacttcctgatcgagggcgacctgaaccccgacaacagcgacgtggacaagctgttcatccagctggtgcagacctacaaccagctgttcgaggagaaccccatcaacgccagcggcgtggacgccaaggccatcctgagcgcccggctgagcaagagccggcggctggagaacctgatcgcccagctgcccggcgagaagaagaacggcctgttcggcaacctgatcgccctgagcctgggcctgacccccaacttcaagagcaacttcgacctggccgaggacgccaagctgcagctgagcaaggacacctacgacgacgacctggacaacctgctggcccagatcggcgaccagtacgccgacctgttcctggccgccaagaacctgagcgacgccatcctgctgagcgacatcctgcgggtgaacaccgagatcaccaaggcccccctgagcgccagcatgatcaagcggtacgacgagcaccaccaggacctgaccctgctgaaggccctggtgcggcagcagctgcccgagaagtacaaggagatcttcttcgaccagagcaagaacggctacgccggctacatcgacggcggcgccagccaggaggagttctacaagttcatcaagcccatcctggagaagatggacggcaccgaggagctgctggtgaagctgaaccgggaggacctgctgcggaagcagcggaccttcgacaacggcagcatcccccaccagatccacctgggcgagctgcacgccatcctgcggcggcaggaggacttctaccccttcctgaaggacaaccgggagaagatcgagaagatcctgaccttccggatcccctactacgtgggccccctggcccggggcaacagccggttcgcctggatgacccgcaagagcgaggagacaatcaccccctggaacttcgaggaggtggtggacaagggcgccagcgcccagagcttcatcgagcggatgaccaacttcgacaagaacctgcccaacgagaaggtgctgcccaagcacagcctgctgtacgagtacttcaccgtgtacaacgagctgaccaaggtgaagtacgtgaccgagggcatgcggaagcccgccttcctgagcggcgagcagaagaaggccatcgtggacctgctgttcaagaccaaccggaaggtgaccgtgaagcagctgaaggaggactacttcaagaagatcgagtgcttcgacagcgtggagatcagcggcgtggaggaccggttcaacgccagcctgggcacctaccacgacctgctgaagatcatcaaggacaaggacttcctggacaacgaggagaacgaggacatcctggaggacatcgtgctgaccctgaccctgttcgaggaccgggagatgatcgaggagcggctgaagacctacgcccacctgttcgacgacaaggtgatgaagcagctgaagcggcggcggtacaccggctggggccggctgagccggaagctgatcaacggcatccgggacaagcagagcggcaagaccatcctggacttcctcaagagcgacggcttcgccaaccggaacttcatgcagctgatccacgacgacagcctgaccttcaaggaggacatccagaaggcccaggtgagcggccagggcgacagcctgcacgagcacatcgccaacctggccggcagccccgccatcaagaagggcatcctgcagaccgtgaaggtggtggacgagctggtgaaggtgatgggccggcacaagcccgagaacatcgtgatcgagatggcccgggagaaccagaccacccagaagggccagaagaacagccgggagcggatgaagcggatcgaggagggcatcaaggagctgggcagccagatcctgaaggagcaccccgtggagaacacccagctgcagaacgagaagctgtacctgtactacctgcagaacggccgggacatgtacgtggaccaggagctggacatcaaccggctgagcgactacgacgtggaccacatcgtgccccagagcttcctgaaggacgacagcatcgacaacaaggtgctgacccggagcgacaagaaccggggcaagagcgacaacgtgcccagcgaggaggtggtgaagaagatgaagaactactggcggcagctgctgaacgccaagctgatcacccagcggaagttcgacaacctgaccaaggccgagcggggcggcctgagcgagctggacaaggccggcttcatcaagcggcagctggtggagacacggcagatcaccaagcacgtggcccagatcctggacagccggatgaacaccaagtacgacgagaacgacaagctgatccgggaggtgaaggtgatcaccctcaagagcaagctggtgagcgacttccggaaggacttccagttctacaaggtgcgggagatcaacaactaccaccacgcccacgacgcctacctgaacgccgtggtgggcaccgccctgatcaagaagtaccccaagctggagagcgagttcgtgtacggcgactacaaggtgtacgacgtgcggaagatgatcgccaagagcgagcaggagatcggcaaggccaccgccaagtacttcttctacagcaacatcatgaacttcttcaagaccgagatcaccctggccaacggcgagatccggaagcggcccctgatcgagacaaacggcgagacaggcgagatcgtgtgggacaagggccgggacttcgccaccgtgcggaaggtgctgagcatgccccaggtgaacatcgtgaagaagaccgaggtgcagaccggcggcttcagcaaggagagcatcctgcccaagcggaacagcgacaagctgatcgcccggaagaaggactgggaccccaagaagtacggcggcttcgacagccccaccgtggcctacagcgtgctggtggtggccaaggtggagaagggcaagagcaagaagctcaagagcgtgaaggagctgctgggcatcaccatcatggagcggagcagcttcgagaagaaccccatcgacttcctggaggccaagggctacaaggaggtgaagaaggacctgatcatcaagctgcccaagtacagcctgttcgagctggagaacggccggaagcggatgctggccagcgccggcgagctgcagaagggcaacgagctggccctgcccagcaagtacgtgaacttcctgtacctggccagccactacgagaagctgaagggcagccccgaggacaacgagcagaagcagctgttcgtggagcagcacaagcactacctggacgagatcatcgagcagatcagcgagttcagcaagcgggtgatcctggccgacgccaacctggacaaggtgctgagcgcctacaacaagcaccgggacaagcccatccgggagcaggccgagaacatcatccacctgttcaccctgaccaacctgggcgcccccgccgccttcaagtacttcgacaccaccatcgaccggaagcggtacaccagcaccaaggaggtgctggacgccaccctgatccaccagagcatcaccggcctgtacgagacacggatcgacctgagccagctgggcggcgac

SEQ ID NO: 1187 - protein, 1367 aa, synthetic construct
DKKYSIGLAIGTNSVGWAVITDEYKVPSKKFKVLGNTDRHSIKKNLIGALLFDSGETAEATRLKRTARRRYTRRKNRICYLQEIFSNEMAKVDDSFFHRLEESFLVEEDKKHERHPIFGNIVDEVAYHEKYPTIYHLRKKLVDSTDKADLRLIYLALAHMIKFRGHFLIEGDLNPDNSDVDKLFIQLVQTYNQLFEENPINASGVDAKAILSARLSKSRRLENLIAQLPGEKKNGLFGNLIALSLGLTPNFKSNFDLAEDAKLQLSKDTYDDDLDNLLAQIGDQYADLFLAAKNLSDAILLSDILRVNTEITKAPLSASMIKRYDEHHQDLTLLKALVRQQLPEKYKEIFFDQSKNGYAGYIDGGASQEEFYKFIKPILEKMDGTEELLVKLNREDLLRKQRTFDNGSIPHQIHLGELHAILRRQEDFYPFLKDNREKIEKILTFRIPYYVGPLARGNSRFAWMTRKSEETITPWNFEEVVDKGASAQSFIERMTNFDKNLPNEKVLPKHSLLYEYFTVYNELTKVKYVTEGMRKPAFLSGEQKKAIVDLLFKTNRKVTVKQLKEDYFKKIECFDSVEISGVEDRFNASLGTYHDLLKIIKDKDFLDNEENEDILEDIVLTLTLFEDREMIEERLKTYAHLFDDKVMKQLKRRRYTGWGRLSRKLINGIRDKQSGKTILDFLKSDGFANRNFMQLIHDDSLTFKEDIQKAQVSGQGDSLHEHIANLAGSPAIKKGILQTVKVVDELVKVMGRHKPENIVIEMARENQTTQKGQKNSRERMKRIEEGIKELGSQILKEHPVENTQLQNEKLYLYYLQNGRDMYVDQELDINRLSDYDVDHIVPQSFLKDDSIDNKVLTRSDKNRGKSDNVPSEEVVKKMKNYWRQLLNAKLITQRKFDNLTKAERGGLSELDKAGFIKRQLVETRQITKHVAQILDSRMNTKYDENDKLIREVKVITLKSKLVSDFRKDFQFYKVREINNYHHAHDAYLNAVVGTALIKKYPKLESEFVYGDYKVYDVRKMIAKSEQEIGKATAKYFFYSNIMNFFKTEITLANGEIRKRPLIETNGETGEIVWDKGRDFATVRKVLSMPQVNIVKKTEVQTGGFSKESILPKRNSDKLIARKKDWDPKKYGGFDSPTVAYSVLVVAKVEKGKSKKLKSVKELLGITIMERSSFEKNPIDFLEAKGYKEVKKDLIIKLPKYSLFELENGRKRMLASAGELQKGNELALPSKYVNFLYLASHYEKLKGSPEDNEQKQLFVEQHKHYLDEIIEQISEFSKRVILADANLDKVLSAYNKHRDKPIREQAENIIHLFTLTNLGAPAAFKYFDTTIDRKRYTSTKEVLDATLIHQSITGLYETRIDLSQLGGD

SEQ ID NO: 1188 - RNA, 12 nt, synthetic construct
  source 1..12: mol_type = other RNA
gagggcgccgac

SEQ ID NO: 1189 - protein, 4 aa, synthetic construct
EGAD

SEQ ID NO: 1190 - protein, 57 aa, synthetic construct
AAGCGGACCGCCGACGGCAGCGAGUUCGAGAGCCCCAAGAAGAAGCGGAAGGUGUGA

SEQ ID NO: 1191 - protein, 115 aa, synthetic construct
GCGGCCGCUUAAUUAAGCUGCCUUCUGCGGGGCUUGCCUUCUGGCCAUGCCCUUCUUCUCUCCCUUGCACCUGUACCUCUUGGUCUUUGAAUAAAGCCUGAGUAGGAAGUCUAGA

SEQ ID NO: 1192 - DNA, 56 bp, synthetic construct
  source 1..56: mol_type = other DNA
tcgtcggcagcgtcagatgtgtataagagacaggataagcagcctagctcaggaga

SEQ ID NO: 1193 - DNA, 54 bp, synthetic construct
  source 1..54: mol_type = other DNA
gtctcgtgggctcggagatgtgtataagagacaggggccagcctcagacacaaa

SEQ ID NO: 1194 - DNA, 20 bp, synthetic construct
  source 1..20: mol_type = other DNA
gggccagcctcagacacaaa

SEQ ID NO: 1195 - protein, 1588 aa, synthetic construct; identical to SEQ ID NO: 333

SEQ ID NO: 1196 - protein, 1837 aa, synthetic construct
MSSETGPVAVDPTLRRRIEPHEFEVFFDPRELRKETCLLYEINWGGRHSIWRHTSQNTNKHVEVNFIEKFTTERYFCPNTRCSITWFLSWSPCGECSRAITEFLSRYPHVTLFIYIARLYHHADPRNRQGLRDLISSGVTIQIMTEQESGYCWRNFVNYSPSNEAHWPRYPHLWVRLYVLELYCIILGLPPCLNILRRKQPQLTFFTIALQSCHYQRLPPHILWATGLKSGGSSGGSSGSETPGTSESATPESSGGSSGGSDKKYSIGLAIGTNSVGWAVITDEYKVPSKKFKVLGNTDRHSIKKNLIGALLFDSGETAEATRLKRTARRRYTRRKNRICYLQEIFSNEMAKVDDSFFHRLEESFLVEEDKKHERHPIFGNIVDEVAYHEKYPTIYHLRKKLVDSTDKADLRLIYLALAHMIKFRGHFLIEGDLNPDNSDVDKLFIQLVQTYNQLFEENPINASGVDAKAILSARLSKSRRLENLIAQLPGEKKNGLFGNLIALSLGLTPNFKSNFDLAEDAKLQLSKDTYDDDLDNLLAQIGDQYADLFLAAKNLSDAILLSDILRVNTEITKAPLSASMIKRYDEHHQDLTLLKALVRQQLPEKYKEIFFDQSKNGYAGYIDGGASQEEFYKFIKPILEKMDGTEELLVKLNREDLLRKQRTFDNGSIPHQIHLGELHAILRRQEDFYPFLKDNREKIEKILTFRIPYYVGPLARGNSRFAWMTRKSEETITPWNFEEVVDKGASAQSFIERMTNFDKNLPNEKVLPKHSLLYEYFTVYNELTKVKYVTEGMRKPAFLSGEQKKAIVDLLFKTNRKVTVKQLKEDYFKKIECFDSVEISGVEDRFNASLGTYHDLLKIIKDKDFLDNEENEDILEDIVLTLTLFEDREMIEERLKTYAHLFDDKVMKQLKRRRYTGWGRLSRKLINGIRDKQSGKTILDFLKSDGFANRNFMQLIHDDSLTFKEDIQKAQVSGQGDSLHEHIANLAGSPAIKKGILQTVKVVDELVKVMGRHKPENIVIEMARENQTTQKGQKNSRERMKRIEEGIKELGSQILKEHPVENTQLQNEKLYLYYLQNGRDMYVDQELDINRLSDYDVDHIVPQSFLKDDSIDNKVLTRSDKNRGKSDNVPSEEVVKKMKNYWRQLLNAKLITQRKFDNLTKAERGGLSELDKAGFIKRQLVETRQITKHVAQILDSRMNTKYDENDKLIREVKVITLKSKLVSDFRKDFQFYKVREINNYHHAHDAYLNAVVGTALIKKYPKLESEFVYGDYKVYDVRKMIAKSEQEIGKATAKYFFYSNIMNFFKTEITLANGEIRKRPLIETNGETGEIVWDKGRDFATVRKVLSMPQVNIVKKTEVQTGGFSKESILPKRNSDKLIARKKDWDPKKYGGFDSPTVAYSVLVVAKVEKGKSKKLKSVKELLGITIMERSSFEKNPIDFLEAKGYKEVKKDLIIKLPKYSLFELENGRKRMLASAGELQKGNELALPSKYVNFLYLASHYEKLKGSPEDNEQKQLFVEQHKHYLDEIIEQISEFSKRVILADANLDKVLSAYNKHRDKPIREQAENIIHLFTLTNLGAPAAFKYFDTTIDRKRYTSTKEVLDATLIHQSITGLYETRIDLSQLGGDSGGSGGSGGSTNLSDIIEKETGKQLVIQESILMLPEEVEEVIGNKPESDILVHTAYDESTDENVMLLTSDAPEYKPWALVIQDSNGENKIKMLSGGSGGSGGSTNLSDIIEKETGKQLVIQESILMLPEEVEEVIGNKPESDILVHTAYDESTDENVMLLTSDAPEYKPWALVIQDSNGENKIKMLSGGSKRTADGSEFESPKKKRKVE

SEQ ID NO: 1197 - protein, 1588 aa, synthetic construct; identical to SEQ ID NO: 348

SEQ ID NO: 1198 - protein, 1837 aa, synthetic construct
MSSETGPVAVDPTLRRRIEPHEFEVFFDPRELRKETCLLYEINWGGRHSIWRHTSQNTNKHVEVNFIEKFTTERYFCPNTRCSITWFLSWSPCGECSRAITEFLSRYPHVTLFIYIARLYHHADPRNRQGLRDLISSGVTIQIMTEQESGYCWRNFVNYSPSNEAHWPRYPHLWVRLYVLELYCIILGLPPCLNILRRKQPQLTFFTIALQSCHYQRLPPHILWATGLKSGGSSGGSSGSETPGTSESATPESSGGSSGGSDKKYSIGLAIGTNSVGWAVITDEYKVPSKKFKVLGNTDRHSIKKNLIGALLFDSGETAEATRLKRTARRRYTRRKNRICYLQEIFSNEMAKVDDSFFHRLEESFLVEEDKKHERHPIFGNIVDEVAYHEKYPTIYHLRKKLVDSTDKADLRLIYLALAHMIKFRGHFLIEGDLNPDNSDVDKLFIQLVQTYNQLFEENPINASGVDAKAILSARLSKSRRLENLIAQLPGEKKNGLFGNLIALSLGLTPNFKSNFDLAEDAKLQLSKDTYDDDLDNLLAQIGDQYADLFLAAKNLSDAILLSDILRVNTEITKAPLSASMIKRYDEHHQDLTLLKALVRQQLPEKYKEIFFDQSKNGYAGYIDGGASQEEFYKFIKPILEKMDGTEELLVKLNREDLLRKQRTFDNGSIPHQIHLGELHAILRRQEDFYPFLKDNREKIEKILTFRIPYYVGPLARGNSRFAWMTRKSEETITPWNFEEVVDKGASAQSFIERMTNFDKNLPNEKVLPKHSLLYEYFTVYNELTKVKYVTEGMRKPAFLSGEQKKAIVDLLFKTNRKVTVKQLKEDYFKKIECFDSVEISGVEDRFNASLGTYHDLLKIIKDKDFLDNEENEDILEDIVLTLTLFEDREMIEERLKTYAHLFDDKVMKQLKRRRYTGWGRLSRKLINGIRDKQSGKTILDFLKSDGFANRNFMQLIHDDSLTFKEDIQKAQVSGQGDSLHEHIANLAGSPAIKKGILQTVKVVDELVKVMGRHKPENIVIEMARENQTTQKGQKNSRERMKRIEEGIKELGSQILKEHPVENTQLQNEKLYLYYLQNGRDMYVDQELDINRLSDYDVDHIVPQSFLKDDSIDNKVLTRSDKNRGKSDNVPSEEVVKKMKNYWRQLLNAKLITQRKFDNLTKAERGGLSELDKAGFIKRQLVETRQITKHVAQILDSRMNTKYDENDKLIREVKVITLKSKLVSDFRKDFQFYKVREINNYHHAHDAYLNAVVGTALIKKYPKLESEFVYGDYKVYDVRKMIAKSEQEIGKATAKYFFYSNIMNFFKTEITLANGEIRKRPLIETNGETGEIVWDKGRDFATVRKVLSMPQVNIVKKTEVQTGGFSKESILPKRNSDKLIARKKDWDPKKYGGFVSPTVAYSVLVVAKVEKGKSKKLKSVKELLGITIMERSSFEKNPIDFLEAKGYKEVKKDLIIKLPKYSLFELENGRKRMLASARELQKGNELALPSKYVNFLYLASHYEKLKGSPEDNEQKQLFVEQHKHYLDEIIEQISEFSKRVILADANLDKVLSAYNKHRDKPIREQAENIIHLFTLTNLGAPAAFKYFDTTIDRKQYRSTKEVLDATLIHQSITGLYETRIDLSQLGGDSGGSGGSGGSTNLSDIIEKETGKQLVIQESILMLPEEVEEVIGNKPESDILVHTAYDESTDENVMLLTSDAPEYKPWALVIQDSNGENKIKMLSGGSGGSGGSTNLSDIIEKETGKQLVIQESILMLPEEVEEVIGNKPESDILVHTAYDESTDENVMLLTSDAPEYKPWALVIQDSNGENKIKMLSGGSKRTADGSEFESPKKKRKVE

SEQ ID NO: 1199 - protein, 1273 aa, synthetic construct
MSEVEFSHEYWMRHALTLAKRARDEREVPVGAVLVLNNRVIGEGWNRAIGLHDPTAHAEIMALRQGGLVMQNYRLIDATLYVTFEPCVMCAGAMIHSRIGRVVFGVRNAKTGAAGSLMDVLHHPGMNHRVEITEGILADECAALLCRFFRMPRRVFNAQKKAQSSTDSGGSSGGSSGSETPGTSESATPESSGGSSGGSKRNYILGLAIGITSVGYGIIDYETRDVIDAGVRLFKEANVENNEGRRSKRGARRLKRRRRHRIQRVKKLLFDYNLLTDHSELSGINPYEARVKGLSQKLSEEEFSAALLHLAKRRGVHNVNEVEEDTGNELSTKEQISRNSKALEEKYVAELQLERLKKDGEVRGSINRFKTSDYVKEAKQLLKVQKAYHQLDQSFIDTYIDLLETRRTYYEGPGEGSPFGWKDIKEWYEMLMGHCTYFPEELRSVKYAYNADLYNALNDLNNLVITRDENEKLEYYEKFQIIENVFKQKKKPTLKQIAKEILVNEEDIKGYRVTSTGKPEFTNLKVYHDIKDITARKEIIENAELLDQIAKILTIYQSSEDIQEELTNLNSELTQEEIEQISNLKGYTGTHNLSLKAINLILDELWHTNDNQIAIFNRLKLVPKKVDLSQQKEIPTTLVDDFILSPVVKRSFIQSIKVINAIIKKYGLPNDIIIELAREKNSKDAQKMINEMQKRNRQTNERIEEIIRTTGKENAKYLIEKIKLHDMQEGKCLYSLEAIPLEDLLNNPFNYEVDHIIPRSVSFDNSFNNKVLVKQEENSKKGNRTPFQYLSSSDSKISYETFKKHILNLAKGKGRISKTKKEYLLEERDINRFSVQKDFINRNLVDTRYATRGLMNLLRSYFRVNNLDVKVKSINGGFTSFLRRKWKFKKERNKGYKHHAEDALIIANADFIFKEWKKLDKAKKVMENQMFEEKQAESMPEIETEQEYKEIFITPHQIKHIKDFKDYKYSHRVDKKPNRELINDTLYSTRKDDKGNTLIVNNLNGLYDKDNDKLKKLINKSPEKLLMYHHDPQTYQKLKLIMEQYGDEKNPLYKYYEETGNYLTKYSKKDNGPVIKKIKYYGNKLNAHLDITDDYPNSRNKVVKLSLKPYRFDVYLDNGVYKFVTVKNLDVIKKENYYEVNSKCYEEAKKLKKISNQAEFIASFYNNDLIKINGELYRVIGVNNDLLNRIEVNMIDITYREYLENMNDKRPPRIIKTIASKTQSIKKYSTDILGNLYEVKSKKHPQIIKKGEGADKRTADGSEFESPKKKRKV

SEQ ID NO: 1200 - protein, 1556 aa, synthetic construct
MSSETGPVAVDPTLRRRIEPHEFEVFFDPRELRKETCLLYEINWGGRHSIWRHTSQNTNKHVEVNFIEKFTTERYFCPNTRCSITWFLSWSPCGECSRAITEFLSRYPHVTLFIYIARLYHHADPRNRQGLRDLISSGVTIQIMTEQESGYCWRNFVNYSPSNEAHWPRYPHLWVRLYVLELYCIILGLPPCLNILRRKQPQLTFFTIALQSCHYQRLPPHILWATGLKSGGSSGGSSGSETPGTSESATPESSGGSSGGSGKRNYILGLAIGITSVGYGIIDYETRDVIDAGVRLFKEANVENNEGRRSKRGARRLKRRRRHRIQRVKKLLFDYNLLTDHSELSGINPYEARVKGLSQKLSEEEFSAALLHLAKRRGVHNVNEVEEDTGNELSTKEQISRNSKALEEKYVAELQLERLKKDGEVRGSINRFKTSDYVKEAKQLLKVQKAYHQLDQSFIDTYIDLLETRRTYYEGPGEGSPFGWKDIKEWYEMLMGHCTYFPEELRSVKYAYNADLYNALNDLNNLVITRDENEKLEYYEKFQIIENVFKQKKKPTLKQIAKEILVNEEDIKGYRVTSTGKPEFTNLKVYHDIKDITARKEIIENAELLDQIAKILTIYQSSEDIQEELTNLNSELTQEEIEQISNLKGYTGTHNLSLKAINLILDELWHTNDNQIAIFNRLKLVPKKVDLSQQKEIPTTLVDDFILSPVVKRSFIQSIKVINAIIKKYGLPNDIIIELAREKNSKDAQKMINEMQKRNRQTNERIEEIIRTTGKENAKYLIEKIKLHDMQEGKCLYSLEAIPLEDLLNNPFNYEVDHIIPRSVSFDNSFNNKVLVKQEENSKKGNRTPFQYLSSSDSKISYETFKKHILNLAKGKGRISKTKKEYLLEERDINRFSVQKDFINRNLVDTRYATRGLMNLLRSYFRVNNLDVKVKSINGGFTSFLRRKWKFKKERNKGYKHHAEDALIIANADFIFKEWKKLDKAKKVMENQMFEEKQAESMPEIETEQEYKEIFITPHQIKHIKDFKDYKYSHRVDKKPNRELINDTLYSTRKDDKGNTLIVNNLNGLYDKDNDKLKKLINKSPEKLLMYHHDPQTYQKLKLIMEQYGDEKNPLYKYYEETGNYLTKYSKKDNGPVIKKIKYYGNKLNAHLDITDDYPNSRNKVVKLSLKPYRFDVYLDNGVYKFVTVKNLDVIKKENYYEVNSKCYEEAKKLKKISNQAEFIASFYNNDLIKINGELYRVIGVNNDLLNRIEVNMIDITYREYLENMNDKRPPRIIKTIASKTQSIKKYSTDILGNLYEVKSKKHPQIIKKGGSPKKKRKVSSDYKDHDGDYKDHDIDYKDDDDKSGGSGGSGGSTNLSDIIEKETGKQLVIQESILMLPEEVEEVIGNKPESDILVHTAYDESTDENVMLLTSDAPEYKPWALVIQDSNGENKIKMLSGGSGGSGGSTNLSDIIEKETGKQLVIQESILMLPEEVEEVIGNKPESDILVHTAYDESTDENVMLLTSDAPEYKPWALVIQDSNGENKIKMLSGGSKRTADGSEFESPKKKRKVE

SEQ ID NO: 1201 - protein, 1556 aa, synthetic construct
MSSETGPVAVDPTLRRRIEPHEFEVFFDPRELRKETCLLYEINWGGRHSIWRHTSQNTNKHVEVNFIEKFTTERYFCPNTRCSITWFLSWSPCGECSRAITEFLSRYPHVTLFIYIARLYHHADPRNRQGLRDLISSGVTIQIMTEQESGYCWRNFVNYSPSNEAHWPRYPHLWVRLYVLELYCIILGLPPCLNILRRKQPQLTFFTIALQSCHYQRLPPHILWATGLKSGGSSGGSSGSETPGTSESATPESSGGSSGGSGKRNYILGLAIGITSVGYGIIDYETRDVIDAGVRLFKEANVENNEGRRSKRGARRLKRRRRHRIQRVKKLLFDYNLLTDHSELSGINPYEARVKGLSQKLSEEEFSAALLHLAKRRGVHNVNEVEEDTGNELSTKEQISRNSKALEEKYVAELQLERLKKDGEVRGSINRFKTSDYVKEAKQLLKVQKAYHQLDQSFIDTYIDLLETRRTYYEGPGEGSPFGWKDIKEWYEMLMGHCTYFPEELRSVKYAYNADLYNALNDLNNLVITRDENEKLEYYEKFQIIENVFKQKKKPTLKQIAKEILVNEEDIKGYRVTSTGKPEFTNLKVYHDIKDITARKEIIENAELLDQIAKILTIYQSSEDIQEELTNLNSELTQEEIEQISNLKGYTGTHNLSLKAINLILDELWHTNDNQIAIFNRLKLVPKKVDLSQQKEIPTTLVDDFILSPVVKRSFIQSIKVINAIIKKYGLPNDIIIELAREKNSKDAQKMINEMQKRNRQTNERIEEIIRTTGKENAKYLIEKIKLHDMQEGKCLYSLEAIPLEDLLNNPFNYEVDHIIPRSVSFDNSFNNKVLVKQEENSKKGNRTPFQYLSSSDSKISYETFKKHILNLAKGKGRISKTKKEYLLEERDINRFSVQKDFINRNLVDTRYATRGLMNLLRSYFRVNNLDVKVKSINGGFTSFLRRKWKFKKERNKGYKHHAEDALIIANADFIFKEWKKLDKAKKVMENQMFEEKQAESMPEIETEQEYKEIFITPHQIKHIKDFKDYKYSHRVDKKPNRKLINDTLYSTRKDDKGNTLIVNNLNGLYDKDNDKLKKLINKSPEKLLMYHHDPQTYQKLKLIMEQYGDEKNPLYKYYEETGNYLTKYSKKDNGPVIKKIKYYGNKLNAHLDITDDYPNSRNKVVKLSLKPYRFDVYLDNGVYKFVTVKNLDVIKKENYYEVNSKCYEEAKKLKKISNQAEFIASFYKNDLIKINGELYRVIGVNNDLLNRIEVNMIDITYREYLENMNDKRPPHIIKTIASKTQSIKKYSTDILGNLYEVKSKKHPQIIKKGGSPKKKRKVSSDYKDHDGDYKDHDIDYKDDDDKSGGSGGSGGSTNLSDIIEKETGKQLVIQESILMLPEEVEEVIGNKPESDILVHTAYDESTDENVMLLTSDAPEYKPWALVIQDSNGENKIKMLSGGSGGSGGSTNLSDIIEKETGKQLVIQESILMLPEEVEEVIGNKPESDILVHTAYDESTDENVMLLTSDAPEYKPWALVIQDSNGENKIKMLSGGSKRTADGSEFESPKKKRKVE

SEQ ID NO: 1202 - protein, 1326 aa, synthetic construct
MSEVEFSHEYWMRHALTLAKRARDEREVPVGAVLVLNNRVIGEGWNRAIGLHDPTAHAEIMALRQGGLVMQNYRLYDATLYVTFEPCVMCAGAMIHSRIGRVVFGVRNAKTGAAGSLMDVLHHPGMNHRVEITEGILADECAALLCRFFRMPRRVFNAQKKAQSSTDGSSGSETPGTSESATPESSGAPKKKRKVGIHGVPAAATRSFILKIEPNEEVKKGLWKTHEVLNHGIAYYMNILKLIRQEAIYEHHEQDPKNPKKVSKAEIQAELWDFVLKMQKCNSFTHEVDKDEVFNILRELYEELVPSSVEKKGEANQLSNKFLYPLVDPNSQSGKGTASSGRKPRWYNLKIAGDPSWEEEKKKWEEDKKKDPLAKILGKLAEYGLIPLFIPYTDSNEPIVKEIKWMEKSRNQSVRRLDKDMFIQALERFLSWESWNLKVKEEYEKVEKEYKTLEERIKEDIQALKALEQYEKERQEQLLRDTLNTNEYRLSKRGLRGWREIIQKWLKMDENEPSEKYLEVFKDYQRKHPREAGDYSVYEFLSKKENHFIWRNHPEYPYLYATFCEIDKKKKDAKQQATFTLADPINHPLWVRFEERSGSNLNKYRILTEQLHTEKLKKKLTVQLDRLIYPTESGGWEEKGKVDIVLLPSRQFYNQIFLDIEEKGKHAFTYKDESIKFPLKGTLGGARVQFDRDHLRRYPHKVESGNVGRIYFNMTVNIEPTESPVSKSLKIHRDDFPKVVNFKPKELTEWIKDSKGKKLKSGIESLEIGLRVMSIALGQRQAAAASIFEVVDQKPDIEGKLFFPIKGTELYAVHRASFNIKLPGETLVKSREVLRKAREDNLKLMNQKLNFLRNVLHFQQFEDITEREKRVTKWISRQENSDVPLVYQDELIQIRELMYKPYKDWVAFLKQLHKRLEVEIGKEVKHWRKSLSDGRKGLYGISLKNIDEIDRTRKFLLRWSLRPTEPGEVRRLEPGQRFAIDQLNHLNALKEDRLKKMANTIIMHALGYCYDVRKKKWQAKNPACQIILFEDLSNYNPYKERSRFENSRLMKWSRREIPRQVALQGEIYGLQVGEVGAQFSSRFHAKTGSPGIRCRVVTKEKLQDNRFFKNLQREGRLTLDKIAVLKEGDLYPDKGGEKFISLSKDRKCVTTHADINAAQNLQKRFWTRTHGFYKVYCKAYQVDGQTVYIPESKDQKQKIIEEFGEGYFILKDGVYEWVNAGKLKIKKGSSKQSSSELVDSDILKDSFDLASELKGEKLMLYRDPSGNVFPSDKWMAAGVFFGKLERILISKLTNQYSISTIEDDSSKQSMKRPAATKKAGQAKKKK

SEQ ID NO: 1203 - protein, 1147 aa, synthetic construct; identical to SEQ ID NO: 463

SEQ ID NO: 1204 - RNA, 20 nt, synthetic construct
  source 1..20: mol_type = other RNA
caggatccgcacagactcca

SEQ ID NO: 1205 - RNA, 20 nt, synthetic construct
  source 1..20: mol_type = other RNA
aaaggctgctgatgacacct

SEQ ID NO: 1206 - DNA, 20 bp, synthetic construct
  source 1..20: mol_type = other DNA
aaaggctgctgatgacacct

SEQ ID NO: 1207 - DNA, 71 bp, Mus musculus
  source 1..71: mol_type = genomic DNA
ggcaaggttcatatttgtgtaggttacttattctccttttgttgactaagtcaataatcagaatcagcagg

SEQ ID NO: 1208 - DNA, 27 bp, synthetic construct
  source 1..27: mol_type = other DNA
tcgagctcggtacctaatacgactcac

SEQ ID NO: 1209 - DNA, 149 bp, synthetic construct
  source 1..149: mol_type = other DNA
ttttttttttttttttttttttttttttttttttttttttttttttttttttttttttttttttttttttttttttttttttttttttttttttttttttttttttttttttttttttttcttcctactcaggctttattcaaagacca

SEQ ID NO: 1210 - RNA, 20 nt, synthetic construct
  source 1..20: mol_type = other RNA
gccatcctgccaagaacgag

SEQ ID NO: 1211 - RNA, 20 nt, synthetic construct
  source 1..20: mol_type = other RNA
gcaacttacccagaggcaaa

SEQ ID NO: 1212 - RNA, 20 nt, synthetic construct
  source 1..20: mol_type = other RNA
tataggaaaaccagtgagtc

SEQ ID NO: 1213 - RNA, 20 nt, synthetic construct
  source 1..20: mol_type = other RNA
tactcacctctgcatgctca

SEQ ID NO: 1214 - RNA, 97 nt, synthetic construct
  source 1..97: mol_type = other RNA
atcctgccaagaacgaggttttagagctagaaatagcaagttaaaataaggctagtccgttatcaacttgaaaaagtggcaccgagtcggtgctttt

SEQ ID NO: 1215 - RNA, 98 nt, synthetic construct
  source 1..98: mol_type = other RNA
gccatcctgccaagaacgaggttttagagctagaaatagcaagttaaaataaggctagtccgttatcaacttgaaaaagtggcaccgagtcggtgctt

SEQ ID NO: 1216 - DNA, 100 bp, synthetic construct
  source 1..100: mol_type = other DNA
nnnnnnnnnnnnnnnnnnnngttttagagctagaaatagcaagttaaaataaggctagtccgttatcaacttgaaaaagtggcaccgagtcggtgctttt

SEQ ID NO: 1217 - DNA, 32767 bp, Homo sapiens
  source 1..32767: mol_type = genomic DNA
ctcttgatcctggtctcaccatgtgatacacccacttcgccttccgccaataattggaagcttcctgaggccctcaccagaagcagatgccagcaccacacctctggttcacctgcagaaccgtgagccagttaaacctcttttctttataaactaccagcctcaggccaggtgtagtggctcacacctgtaatgccagcactttgggaggctgaggcagtcagatcacctgaggtcaggagttcaagaccagcctgaccaacatggcgaaacccgtctctactaaaaatacaaaaattagccgggcgtggtggcgggcgtctgtaatcccagctactcaggaggctgaggcaggagaatcgcttgaacctgggaggcagcggttgcagtgagccaagcgcgccactgcactccagcctgggcgacagagtgagactccgtctcaataaataaataaataaataaccagcctcaggtatttctttatagtaatgcaaaaatgaactaatccagagagtaagtaaacaggaggaaggaccacctagatcagaagcttacctcacacaggtgagggtggctagcgggtaagggattagaggcggtgagcacagcagaaggtgtgggtgaagaggcaggtacaggccaccctgtggaggacttggaacagcagctaaggctgtgggaccagactctttatgcagtaaagagccacagacaattgtgagcaagacaccttataaccaggttttagaaagaatcctcagctggaaggaggagattctgcaggaagagggtgggggaaagttgaagttaactccaaccaaagtcaaccttaaatattaacctttttttcttctgactttcattgacttttccgtgcattttcagtgcccttttcttgctgtaaagtaaattttaaatattatgtcaataggtcacagaggcaacagacaggcaaggtatggttatgagaaaaacatttccctaaacaaaattagaagacagcatttgatgaaagatttttttcctaacttgtgagtttgtttacataaaaacacttacaaaattagtcaatcaaaataacatggagtcatttacttaaagaattccttacgtttaaaaataaagtacttgaatatggaatcaacctaagtgtccatcaacttaagtgtccaatttaatccatcaactggattaaaaaactgtggtacatatataccacgggataatactcagccataaaaaagaatgaaatcatgtcttctgcagcaacatggatggaattggaggccattaacctaagtgaaataactcaaaaacagaaagtcatttgagaccagccttaccaacatggagaagccccatctctactaaaaatataaaattagccgggtgtggtggtgcatgcctgtaatcccagctactcgggaggctgaggcaggagaatcgcttgaacctgggaggcggaggttgcggtgagccgagatctcaccattgcactccagcctgggcaacaagagtgaaactctgtctcaaaaaaaaaaaaaaaaaaaaaaccgtatgttctcacttataagtggaagctaaacagtgggtacacgtgggcatacagagtggaataatagacactggggactccaaaaggtgagaagggaggagaaagtaaggattgaaaaattacctcttgggtacaacgttcactgttccggtgatgggtacactaaaaagcctagatgtaactgttatgcaatccgagcatgtaaacaatctgcagccgggcttggtggttcatgcctgtaatcccatcactttgggaggccaaggcagcaggattgcttgagcccaggagttctagaccagcctgggcaacatagtgagacctcgtctttacaaaaattttaagaaattaggtggccatggtggtgtacacctgcggtctcagctgcttgggcggctgacatgggaagatcactagagcccaggaattcaaggctgcagtgtgccatgactgtgccactgtactccagcccagatgacaaagactatgctttaaaaaaatgaaaatttaaaaatcctgcacttgtacccctgaaatatataaaaatagaaacagaaacataaataataataaaatgcatttcttttacacataaaacaaataaaagtaaagtacttgaaattagacgattccagaaaattgttgacatgtttgttcccctaacaatttggtactttggtctcctttatgaaactgtgaaagctccgagccaaaagctttgtctttcttcattcttgcatctttagtacatatcacaatgctttatatatgacacgtgcatgactatttgttgttaattgaatggtatatcatatttcaatagacattttccccaacattctattggaaaacttttcacacacatagcaaactgaaagaattttcagtgaacacttgaatttctaccaccaagatttcactattaatattttactgttcttagtttattacatatctatccatgtctgtatccattgatcaatccatcttatttctcttggtgaatttcaaattaaattatagccataagtatacttaaatacatccatacgctgaacacatcagagttgaattacagttcaagatttatttacattttttttcttctgaggcaaaatcacatagcatgaaatgcaccaattttaagtgtacatttgctaagttttgaagaatgcatacacccgtgtaaccaaacccctttcaagatgtgaaaatgaccatgaccccagaaaataccaatacctcttcctgctcaggcctcatctctatctctgagaggcaatgacttttttatttaaattttttttagttttgcctctcctagaactttatataaatggagtcatatagtgtggactctggaatagacttctatcactcagcataattttttgagattcatctaggttgtgtgtaccagtaacacatttctttttgtagaaaagaaactattttgcaatggaatgcagtagcgttctattgtataattatgtcaaaattgtttttccattctcatattgatggacacccagactgtcttcagttttgtgttatcaaaaatgaagctactataaacattcatgttcaagccttggtggccatatgttttcattgctctggggcaaatacctaaattgctgggtcatggggtaaatgtatgtgtagacattttttagaagcttttttttttttttaacaaaaatgccaggctatacttaccatgctttttctctcctagtttgccaatttattatttatttatttatttattttcttgagacaaggtctcactctgttgcccaggctggagtgcagtggcacaatcatagctcactgcagcctcaatctcccagactcaagtgatccttctgcctctgcctccagagtagatgggaccacaggcacgcaccacatcaagctattttttttatatattttttgtagagatggggatttgctatgtggccaaggctggttttgaactcctgggctcaagtgatcctcccaactcggcctcccaaagtgctggcactgcccctggactagcttgccaatttaaaagaaatccctgagtaagagcacccaaggtccgctgaatgcccttcacctcactcggaattctagagcatccgaggatctttccattccatatgatacacaccctaccacacactcaaccaacagctgactggatgagagaggtactgaacctaaaagtggccatctgcaggttgtctagaagcccaagagatagactgttcaaagatctggccacaatgggatgacaaagaataatcagtccagctaactcccttcttattaattagaaatggagacactggaaagagacatttagttaaaagtggacacagaaggaaaaagacacacaagcaaagcattcttcagatttctttgagagcagctaaattgatggttaaagagacatgcggaaattcatgcttttctaaggaatgagctctttaggagtttctcttgcaaacaaagagaaataaaattcccacataatctggagcactctaaggaagggtagaaaaatccatgttcttgctagtacaggacttagagtcttaaaaattagagaaattcgtttaagatttatagtcttaaaaattagaaaaatccacccacctgatccacattgagaagctggaatgaaataaaaataaagataatgattaaaaggaatattccctcaatatttccactccctgcatccccgacccgtctgcgtctccctctactctcatacatactccagtaatatttggccaaaagtagaagccagggggttagaaaaagaaataggataaaccaagacaaactatcaaggaagtaaaaggaacatagaggcaaacaaaatcctcatgtctctttccccctcctcctgacatagccctgataactagggaggaagagcatctgctaccgggtgcatcctctgaacattccaatgacccgacccatggaaagagaaccaaattcttcagcccagcttctaggatcttacctcaagagagtcttaaaattatgaaaagatatgtatataaggatgtttgctactatgttgtttatcatgtaaaaattgtaaacagcaggttattggtagagttccttcaaaatgagctgtgggccgggtgtggtggctcacacctgtaatcccagcactttgggaggccaagatgggaggattacctgaggtcaggagttcaagattagcctagccaacacggtgaaaccccatctctactaaaaatacaaaaagttagccatgtgtggtggcggatgcctgtaatcccagctactgaggtggctgaggcagaagaattgcttgaactcgggaggcggagcttgcagtgagccgagatcacgccactcctctccagcctaggtaacagagcgagactccatctcaaaaaaaaaaaaaaaaaagaaaaaaatcagctctgtgcagtgctacatgtggattaatgaagcattgaaagttacaacccttttggtaattgcaagggaacctggaatagatctacccaccatgctatctgacctttctaaacttgtgtgtcagttgcaaggtttattggtccactttttagatgagcaagccaaaggtgaggttcatgcaactgtggcacacctatacacaggtaaagcttttggacacagtggcctctgttactcaagggttcttaccccagtcaaagggtgttctactgcaagtagttcttaagagagaaaattcaatgtgcatttccctttggaataataatactctgaagcacagagagaacctggcacacgacaagggtgatggtgatcacaccactagtaaagaatccagtatgcactgggtaccttctctggacaggccctatgctgagcatttctcatactattgtctgatttgatcctcacaacagtcctagtgatcagtactatctattattttgcccccatttgatgggtgagttggagaagctatacaatatataaagctggtggtttgtctcttggcttttgcatcatcagacagttcaccccagctaaagaaatgatgacgggaacaagaaaaaagccaaggttaagggcacttcagaacttcagaaaaacatttgttgcctcttccaatttttggatttgttgggacagagaaaggctgtttaaaaacaattcaagagccaaagacatacaagtgtttgtttcttggtttttctttaaatgccctaagctatttttcatctctaaaaaaaagcacagggtagaaatttccattcacctgtgactggctaatctttagcgatcacttagcaactgggtaacaaatggaggttggcaaagcccagctgattagcattcttttttagtcaaaagatcagagttatcacaaggcacggccaacagctctgaggcttacaggcaatggaaaggtcagacaaagtcgctgttcgttttgtttgtctttttttttttccttcagagcaaaacaagttttctttgtttatttggtttaaaaaactcataagatctttgcaagagaacagatcctggattgtgggaagggtccccagcttgctcagtagagcttctcagtttttctatctctacagaaatctacatcagcccataatgaagatcggctatgaaatgctttgaagtctctacaaaaaaattaattgtacaatagattttcaccagtggagcaaataacagcaataatttgcaataagtgaggaaaacacatttacaatcacaaagagaattaaaagaagcttgagagaccaactagtccaatcctcccattaggacatacctcccgaccagtgaaaggaggaagggggccactaggtatcattcttggttatccactcccagggttcacagcatctgtatcaggaagttctttcttaagtttcactggagtccctcttgctactatttccagctaatctcttcttgtaactcttcataaaagaggcatcaatctttcttaagagctatcttagtcttgcttgatgtgcgtaatgaattcatgaagacctttctcttctccaggttcaatttttaaatccactggggctggcagcaggactggactttctaagtcctgaacatagaaagatttataacacagcccttggctgcaaggagcttatgttttcatggggtaaagtagatgtttaaagaaatgatggcagcagagtgttattgtgtaaagttctgacattctttgtttttgaaactttgcattttgatatctgtccattcgagattaccctatttttccatttcaaaattttagctatatttttgttacaaaatttaattcttcattccactgatggggttggggtgggggggtggggtgcaggaataatagaatgggcctgccatctagtggcaaaatgagacaaaaagaacaccaaactgtaccagcatccttgtatctataaggaggagaacaaggaatatatttcctggattcaaggtatcaaaaattgtaagatgcaccattggtttagtaagggaacaaaaagaccaaaaatggaaacaaatacaacaaatatatacatcacctggattttagaaatgctaggagaagtgaggggcatcttaaggaaatatgctcatttttcactactttctctctaacagttggcagctgatgatgagtagtgagtgcagctaacgatggggattaccatgcacccagtccctgctgtatgctgaatatttcacaattgtccacaaaagggatatcattttagccatttaacacctggagaatgggaggttcaagaaaggatccactcttgaccttagagccagcatttaaactcaggaggctggcttacagagttcacaattgttctactctcctaagctcccttctgctttctctgcaaaccgtagtgctttcccgctgctttccttgaactctctcctagacacacagacaaggtctgatgactccaattattggacttccccgcatactccagttcactcccctctcctggatcagatccatgagctgttagctcctgaaactgttccacctcagaaacctctatctcaagccccagggtatggctctattcccatcacctcttctcttccactttctagtgatttctagaaaacctttcctccctgcttacagatgccccctaacttgcagacaccctctaagtggtcctgagatagcaacctgattccttcacagccttggcatgaaatttaggaagccaggagtgtcccagagggcaacatggagatgcagagagaacaggtggctcaggggaggcctagggtcaggaattgagtccagagagggtggccccctcatcaatagaggcaaaacatcaggggccttgaaattcagcagcaagtctcagcatattggtccaaaggacaagtgcaattagacacatctcaagaaagaatggtgcggaacattcggggacagcctctctattccacagcagagaccagcatgctgggagaggcccatcccaccaggagtatgggtaggtctctccctgcacccagaggcattttaggaaaacaggagggagatgcaagacagcttaagttaacccagaaatgactactttaaaccataagaaacagaatattcttgctttggcaagtttaaatagtatcccaccccagcctccagcattggtagaaatggggctctaaacagcagttacagaagacaaatgaaggccaaatctatgcagatttgaataacagcatgtatctatcagcatgtattcaagaaagtagagtcactgtggatatcatggaagaagagacaggatagggattagacctgacacaattgtgggagaagctgggaaggcagagatctggaaggggaagtgagagtatcagagaaaactcactgtccagtcctcctgaagccctggccaagtgtattgatcagagcttgctagagatcagggaaggaaggccaagtgctgttgggctgctgaaacaggatgacagtaggggagctgggatgtgtgggtagggagtgttggccactgcaggtctacggccaagtggctggtggtgggccaacaatcagaaagaagacctggacatggagaggaacagagcaaagacgggctggggcccacagggcattgcccatctgatagtcacgatatcagcctgcaaagggatccagagaaaaacgaccactatttctcttctgcctctcaaacctcatgcaagtgtctcttttggccaactctatttaggatccatagagggaagggattctgaaaaacacagttcctaacatagccagaggtgactgtggaacaatccagcacactgagtacatttcaatcctgctccaggatttatagctttaaagttattacacatatgaacacgtggcagcgccaaatagcactggttgaattcagagaaagccatggaaaaggtgactctggaagtggacccgatatattttctatctaaaatttttttcatgcactgaacattcatcacatagtagctgacgtgtaacagattctccgatgagcaatataattcattacctacacatgctgtgctgataccaacattttccccaaaccttccttcttccttagtagagagttctcaaccaggatctgccacctccagttattcacaaacagtggcggaagagaaaattccaagcttcctgtgtgcctcgcattcagggtttcaagaacagttctggtgaatcaataactgttctttcaacaaggatggagagcaattgaaaaggttggctgtgacatgaaattgcagtgtggctgcaatttccttgtattttctaaacaagaccttaaaggctccagaacattgaaacgctgtgggtgtcattcactcttacaatagccatttccttggaccgtcttcctttctggatgataaaagcccaaaatgccaggcactggctgtcctaccatcacacatagccaggacctgccttgtgtcccaatcctggctcccagcatcagagggaaagttgtgaaaaggtgctgctttctcccagataaaaagaaacatccttttccctcctcaggcttctgcagaagacagctctggtggccgtgttgagagctgtgagagaagtcaggagaatcacagagaagcaaaacccagccctgtgacactgctgacattgtgagacaacctgcaaccacccactgcttgattcctctcatgccagatgatcaagccactcttgggcctgatacatttttaacatttccagttttgcaagggattcactgctttttcgcagcccactggacttaactagagtgcccaagcaagcccacttagggccacagaaaaacccaagtgctctgtatgcaatctccatgctttcctcgggctgcctctcatgtttcctgccagactctgccatctcctggctttgctactttctgttgccagagatttgctctgaaccttggcttctgctgactcaatcatcaggctttggatgtattaacacaactttgccctttgttctccttcagaataagaagtccatttcctgccccatgcatcctttcaccccaggtaacctcatgccccagccttgacactgccaagctgggtctacctcatgcccaccaaacctgtcccaacccactcctcctataggcataaaatagatgaatggagaccacgtggaactagtccataggactgtgtataacaaagcttcatgggaatttttctagggtcacaatatattttcagttgaacgcacggtgattcacgcctgcaatctcagcactttgggaggccaaggcagaaggaccacttgaggccaggagttcgagaccagccagggcaatatagtgagaccctgtctcaaaaattaataaaatcaaattaaaaataatattttctcctatgtaattccttagagttgaatgcatagacaccaaaaaggggaaagtttgaaaaatcagctatagtaccaagaagaaatcaatgcccagagaaggaataataccaaattcattagagtcccagactcttcctctgtgttaactctagtcatgtatttgtttatgtggaggtcttctacagtaagtattggggcaatactgatacctgttaaaggatattatgcctttgacaaacgatttttttcttccactacatgctaaatgctgtcattatcaatatagagaatgtagttaaacttccacagtgggcacaggtgaagatttcactgccatcaatttcaaacctaaaccctgatctcagtcagtatttataattttatgagttataattaggacatccaatttgtcttgagtttgcacatcattatgcttcacaatgaaaaataagcaggttcttggtgcctgaattttgttaatcattcttcctggttggggaccttaatcttggcttcaactctgacattaaattaaatacacttgcacacaaattattctaactgccttatttagccagagaagaacagggcctgtccgtgaagcatttccccattacctgcacctgagctagtccctgatctagcactgtcagctccgcaggcaggcctggcaaggtttaccgttctgccccctgccctgggaatctgtatccaggtctctgagtgttgcttcttctggcctaccctatgcccccacaaccttcacacccacccgctactccaaatctgattgggtccctctacgtaggtgtttccaagtggtaaactgcacctagtgctatcgtttggatatctgtcccctccaaacttcatgtgggaatttgatccccagtgttgcaggtggggcctagtgggaggtgttcgggtgatgggggcagatccctcatgaattgatgaatgccctcctttgaggatgagtgagttctcacccttagttcccacgagaactggttgttaaaaagagcctggcaccagccctttctctcctgctccctcgctggccatgggatctctgcacacaccagctccccttcaccttctgccatgagtggaagcagcctgaggccctcaccagaaccagatgctggcaccgtgcttcttatgcagcctacagaactatgagccaaataaacctcttttctatataaattacccggtttcaggtattcctttatggcaacacaaaatggagtaggacacctagacatccaggtttataaatgtagacacatatatacgtgcattttcacacatagcttgttagaatgtgtgtgtcgctggggctcttttatctatacacttggaaaaaggcgtctgcttcattttatttttgcctttgctcacctcggctcctttatttctgatactagcaactcaagaaaggggcattttaattcaatcaaccaagaaaatcaatcccaattgacctcgggaccatatttttattttcattgaaagttaactaaaattattgaaaagaatgaaaaataataagaaacagaaaaacctaatagcttggaacaacatgtattcgctaattttgtttactaatacctccatccaggggagttatttctagcaagattcttttttatttttatttttattttttttttttttgagcggaatctcactcagtcatccaagctagagtgcagtggtgccatctcagcccactgcaacctctgcctcccaggttccagtgattctcctgcctcagcctcctgggtagctgggattacaggcacataccaccatgcccggttaattttttgtatttttagtagaaacggggtttcaccacgttggccaggctggtctcgaactcctgacctcaaacaatctgcccacctcggtctcccaaagtattgggattacaggcgtgagccaccatgcctggcctgcaagatccttttttattgaggcaattaaaagttagaagagaagaaatggctgtgtaaaaataggagcagatagaaaatgagaatggccgggtgcagtggttcatgcccacaatcccaactctttgggaggccaaggctggtggatcacctgaggtcaggagttcaagaccagcctgcccaacatggcaaaaccctgactctactaaaaatacaaaaaattagctgggtgtggtggtgggcacctgtaatcccagctactcaggaggctgaggcaggagaatcgcttgaacccgggaggcagaggttgcagtgagccaagatcacgcctaggagtgcaaaaaaaaaaagaagaaaagaaaagaaaatgataatcttaccatctcagccctcaagtaaaagtaaagggcagggctaagtcagcagaatgatcaggaaactgattccacagccctattgcctaaatagggagggacaaacaagattcaggcatttccctcttggtctacatgtggattaggtcccccaccagtaaaaactcctccctaatagttctcacagttgttcacctaaacctgagcagtgctctggggtgcattagctggtgagaagctctccttgcttgagccagttttaggagaaggaacagtgggattgaaagtcactagggagctagcctatggccaagtgctatgaatggcctgccatgttccagaaacccccatgtgagatctttctctgggttaaagctccatggttgctaattgctgtgagagtgatagagtcccctaagtctaatcaagcctggaagctgaaggacattgtgtggacttgggccttgagaggttcccgaactccagaattctgcaagttatatgactttcatttaaattttctttttaattgagaaggagtctcactcagccacccagggtggggtgcagtggcttgatcacagctcactgcagactcacactcctgagctcaagcaatcctcctgcctcagcctcctaagtagctgggactatgggatatgccactatgcccagctaattattttttggtagagatgaggtctcactacactgcccaggctggtcttgaactcctagccttaagcgatcctcctgccttggcctcccaaagtgccgggattacaagcataagccaccatgcctgcagttatatgacaatgattgtttctctttaaacgaggaagcattagctcagagaaatgagaaatctctgtatgtagtagatgatgcaaaccatgctaaaataaacacatataattggagaagctaagatcattcttaaagctaggtcagtcattccagctgccaatcaaaacctgcacacaaaaacctggacataagtatttatagtagctttatttatttataatttggcatagttgatgccaaaacttggaagcaatcaagttgcccttcaataggtgagtggataaacaaattgtagtgcatccacacaacaaaatacgattcaacgataaaaagaaatgaggtatcaggccatgaaaagacatgaagaaattttaaatgcgtattactaagtgaaagaagccaatctgaaaaggctacatactatatgattccaactatctgacattctggaaaatgcaaaaccatggagacagtcaaaagaccagtggttgccaggggttgcaggggaggtagggaaagagagggggataactaggcggaatacagggggattttagggcagtgaaactattccatatgatacggtgatggcggatatgtgttatcatacaattgtcaaaacctcattcaacacaaagtggatcctaatgtaaactatggacttcagttgagaataatgcatcaatattggctatcagttacaacaaatgcaccgcaccgatgcaagaagtttatcattggggaagctgtcaggtggaagatttgaggagatacaaggataaaggggataaatagtatataggagacaaagaacaagacttggctgaaagaaggcaacatattagaaagaggttttataagaagccattcaagtgaagaaatataaggatagactgagagccgattctttgttaaagccgtgctttccaggccttgctcttcccaatctttaccaatcttcagcaatgcagaggaggaaccagagactctgggagacctgagattcatctgcacacccagaaggtggtaaaagcagggtttggacgaggtctgtctgcctcacagctcctgatccttcctccaccccaccctccctttgactacttagaggagaccccagcttgtcttctacttgggacaggggtagccatggaaatactaggaacaacttaacagttattcccagcagctgcctaaggagattttctctgcaagaacagaggataatgaattctcctaaagaatgagagaaatcccagaggtaaacagagatgcaaacacccaaaaaggtcacagtcacaacgatagcccagcaagacagcatcgaacgacgagtctgctctgtctttagagaagaggggtgttttctgagagcctctcactgcagattccctgctgatctggcagctccagcctagcgctcagaggaagccacaatgagaccaattttccacagtcctaagaagagacacatccccttctgtgtatacatttctcttgtattcactgttttcactcaccccctgcagcctgcatgagatttgaaattacaacccttataccttcaagtccagattatccttcttaaagggaatcaactattgttgaaatccccagataatcccccaacctcatttgtaccattttttgtactgctttcccagaaagttcaagccctagactgaaggaacacatgaagtaaaattgatggctttgaatggaaaatcccagccaagaatccaaccgaacatggtgtaccagggccccaagcatgcttcctgttccccactagctaccggctcccaggcccattcctgctcagactgccgtgggcctgtgcagacagccctagaggaggcgaggaggttccttccagactggatgaggtctgggtaagggcagcaggcacagtgcagactcctcccgcgagctcaggtcagggcacagtctggctgccgtcaaggtttggatcttaatctccgatttggctctaaaagctgctcaggcagcacccagtgcaataactgtggggcaaaatcaagaagtatctagcaggagagggtttccagaacaactgtgccaggggtcctaaaaaccgagcattgagcctatggacactagcccctggatggtctagaaggcccaggatcctactttaacctgttctcccagccaagcaggagcaaaccacatctgacttaatatactcttgtggaagatctacctgctgtatgcttcctcacagtctctgctagagccactagcatggtacaagtgaaaacaagcttgcaggacggacacgtgggagataaaggggaaagagaggaaagagagggaaggagggaaagtgggggagtgaaaacagtctctaggtgggcaaagggtaatgaaaatttcagtgctagaactcccttctcctccctgcttcatttctgtatctttgaatcttatcatttgctctagaccccagtgaaatctccacaaagtcttctttaatgccacaactgaatactgagagctccccatttcccaagtgtgttgggcaatttcagtcggaaccaccaacacagccctttatgacatgcctctggtttcgagtatataacctttgttcctgacacactctccaaacaggaggcttcacttgctcaaggacagttatgctagacactttccttgtagccaagatctaggactgcacttcacccttcaagaggggcattcgctcactgattgaactccctccccaagtcccagcatgctctcatctatgtaggcactggcaggagaaccctcgagagcttttcttcaggaccaagggaaggtagtgctcttgttccctatctctgggcctccagagtatgagggcacaaaggtacagcagagggcctgccaatccttggcctaggcatttcaggtggtctggagctgatattcatccagaaatgggttactatttttcaaacatacatacacacatttgatttataaaatacaagccaggcatgaggacttatgcctgtaatcccagcactttgggagaccaaggcaggaggattgcttgtgttcaggagattgagaccagcctgggcaacatgaagaggcattgtcttttctttgctttttttttttttttttttttttgaaacggggtctcactctgtcacccaggctggggtgcagtggcgcgatctcggctcactacagccttcacctcctgggttcaagtgattctcctgcctctgtctcctgagtagctgggattacaggcacccatcatcatgcctggctaatttttgtatttttgtagatacagggtttcaccatgttggctaagctggtcttgaactcctgaccacaggtgttccacccacctcagcctcccaaagtgctgggattacaggcgtgagccaccatgcctggccaagaggcattgtctttacaaaaaaaaattgtttaaaaattagccaggtgtggcagtgcatgcttgtggtaccagctaattgggaggctgaggtgggaagtttgcttgagcccaggaggtcgaggctgcagtgagctgtgttcacatgacaccactccagcctaggtgacgaagtgagaccctgtctcaaataataatttaaaagaataaaatacaaagtcatttcaagccattactgactttttattaacattttgttataaatttatttttaaataggtagatattagaagttcaggtcccaggattttttgacatttgaaagaacttcaatgtcatattagaacattttggaactactgatccatacatgaatgctgttcctctcctcattcacagtcaggtggcatgctgctagctgcagtccagaatccaggttccccatttatgaacacacagtcattgagtctgccaaaaatcagcttctgaatttgcagaagttcaaggcttagggaaaagtttaaaggcaactgatgcaacagtcacgcttgaccaatttgctgggagctgaaatcatacacaatctataaatatgacttaaactgttctatttcagtttataataaacaataaggctcagctccaatccttccctctccccagtgaggattttttttttttttttttttttttttttgttgagacggagtctcgctgtctcccaggctggagtgcagtggcgcgatctcggctcactgcaagctccgcctcccgggttcacgccattctcctgcctcagcctccccagtagctaattttttgtattacgcccggctaattttttgtatttttagtggagacggggttccaccatgttagccgggatggactcgatctcctgatctcgtgatctccccgcccgcctcggcctcccaaagtactgggattacaggcgtgagccaccgcgcccagcccccagtgaggattattcagagccctacccttgcatagttaggaaaggtggggaccaagtttcatatttcatggtattaacagacacaacaaaactctctttccttgacccaattcactgcctttattttcacaaactacttggtgcaatagtcatttagcatagcgtgtcccactaaaataaatggcggcatcatttaaatgccatactaacttgttatatttctacgtgcttataaaccatgaggcaactatcaagttaataaatatccaaattctgatggatttacatattatattgttgacactgtatttgcattcagagcaaaaatgaaatgggtcttaaaatgagtcgtgataaagtgattgctatcaaaaggctggaagatggatccagacagccgtgggcttgcaactttctctgtcgaacaacaaacatagccaaagattaaagtgctcaaataaaaattagagcaggtctgccaaccccatttccacctctacctgatgagaccagtgttcatgaattactatggcccataaactgtgttgtgcttcttatccactattgaattcaatcctccctaacaagcagatgctattcttgtcactatttaacagataaggacactaagcctcggttgtgtaagaaaacacaagtaaacaatctagtacaaagcaaactcaggcaaagtcagactcagaccaagattttctgaaaatccaaagcccatactattcctcctacattactttgcctctcaagtgaaatattatttctttgcctagcagccttcacttacagccagggtgggtgtggacagatctgtatatggctctagtataagaaagtggggagatgtttagaaggctcaaaaaattgttgacaccaaaaattcaaactatcccctgtccacagaagtcccagctgagtttttaaatcaatattccctcagctgaccatgataagacagagatttcaaaaatcaaatatgcacagacatgttccacttactcactcatgtaaacttcttaaaaactcggcaatgaattaccatatggagctccaagtacaaatgctgtgtctatcgcctttgaggtctccaggcagaggtgagcagtgaaggaaggactctaggggatgggcataatgcatggtgggcagcttacccatctcaggaactggcttcagccccatggcaccacagggatggaggtaagagattgcaaatgcagtgggctgactgcaactgtgctattaggaaaactgctaaccccaatcagcagcaatcacacttgatcttcaggatgactttggagcagttctcagaactaagcagtggagagaaggccaaatgaggttatacatgactcagataaagctatggataaattaattttgttttcttgtgtgaacatttatcccaactgaagaattatagtgttggcatgaatatgcattaaaagaacagaagctgaattgtgttccaaaggaattgtattgactacacaagcagctaatgacatggtttacttctctggaagaatcagcactcattttcagagtgaccttatagtttaaattctttgaattgagagcacaatgaacaagctcctctactgaatttataagtgactatgacacggcaacaccaagtcactatctgggtaactcatctgcctgtggaaacctgtgttgatcgttgcttttgcaccagccttcctaagctagtgctgtctgcaaacagacctttctgtgcagattaaagagagcctgattcagtagaacccacatgtcacagatcatttgctttgcctctctcgacacagaacttcagcatctgattaaaggaggccaggtgtccaacatctggccagatggatttgtttctgagcaaagtcagaggaaaccagaggtagacatgcacctggtccccagtcagcttagcccttttaatgtgcctagccatccctgaagttctgccctgttaacgaaataggaatttgccattgctatccttacaggtgttcacaaagccatagaataaaatgactacaatttgagatcaactgactcaaaaactttatctcctagaggaaaggaaactaaagtccacagaagttaagtgactaggccaaagttacccagctaggagatggcaaagcttttaaagacaccagactctagattccatggcccaacctcactcctggttattagttgcatctaagacaatggctttcaaactttagcatcagaatcatctggagggcttgttaaaacacagattgccaggtcccacccccagagtttcagattcagtgtttctggactggggccctagaatttacatttctaacaagttccctggggaatggtgatactctcggtgtagggcccatatgtggagatccactgaggtagcatgtgtgattagataggaggaaaagttgctcatctgaccccagggacacaaaagatttatctaaaaactcagaataaagaagtttgttccagtttccaaatctgttctaggctatgtaagttagggggaatttgtcttctagaatgcacattttagaggcttttaaatgtctgggggaaaggcttctgttcatcctgataaaccatcctaaggaagctttacatttgagtctgaaattaaagatgacgaaataatcctcagacaaatatagaagcccagggaaaaggatgggtggcaatggaaggtgggcacaggcatgtgggcggtgatgtggcttggctgtgtccccacccaaatctcatcttgaaatttagctcccctaattcccacatgttgtaggagggacccagtaggaaataagtgaatcatgaggttggtttcccccatactgttctcgcggtagtgaataagtctcatgagatctggttttataagaggtttcccctttcccttggctctcattctctcttgcctgctgccatgttagatgtgccttttgccttctgctgtgattgtgaggcctccccagccatatggaactgggagtccattaaacctcttttactttacaaattacccagtctcaggtatgtctttatcagcccggtgaaaatgaacaaatgcaggtgggaaaagaaggacacgatcagtggatggaacaaggagcactggggctcagaagcagtctggctcagttgggcacacgcaatcaagaacatgggaaaatggcagctggattgttgagctggaatcaggaatgccagaaataggatagagggcaatgccagtgttggttcactaagagagaaagcaagacccagctgcgactgcagctgactccattcatttattgaatcattcagcaagcatttactgggcatctcctgcatgctaggccctgcactaggactggggatgcaaaaagtaagaaggcattgcccaagaaagagaaattgtgaacacaaacaactctgatggaatggctaaatgttcaacagaggtacaaagcactgcatagcagagttaacttctgcctggagaaacctctacttgaagtttctcttgcttttatcactggccaaaggttggtttaccccagcgctctatccttggacttcttgttgttaaaggcttttgggtccagggctggtatttatgcctgtaatcccagtgctttgggaggccaaggcgggaggatcacttgaggccaggagttcaagaccaatctggggaacatagtgagacccttatctctacaaaagtgagtaaataaattagctgggtgttgtggcacgagcctcacttgagctcaggagtttgagtgcagtgagctatagtcatgccaccacactccatcctcggcaacagagcaagaccctgtccctaaaataaaataaaataatataaaataaaaatttagtccagtggtgaactccaaatgctatacttgaactcacatgctgaatctccatctccaacctgatttcctccaagctccatctcctaggctgtcacttccagctgtcctctaggcatggatgcctacatgtcaacctttttatctcaacatgtccaaaagcagattcattttctttcatatttttaatcatataagctaatggctttactatctaaacatccttccagacatttttggctcttctcactcactttccatttctgatgtcaccagaatctcttattcctactcccataactatctctcatctggccttttctctctgtaaccactgccttcagcaacactccactatgctggctccttcagacaattagaagtgtgagggagaatggatgagaaaggggtaaaggccctaggctggcctgtcacaggctctgcccagaattcaactggtttttgaatggtcaaagcaaaaaaccaactcatgaccatctctgaatgtcagactaaggacatttgactttatttggctggccatgaggagcgcggaaaagcttttgtagagagatgtgatgtaatcagaggtatgcattaagaagattaatttggcagtagcttatagaaaagattatatggaaaatagattagcagtaaggagatcagctaggacataattgcaaaaggccatatgattaacagggaaggtttgcattcagttggcagttgtggaaacagaaagtaagagatgagggaaatattttggaaatagagttggtattactttttgaagtctgatgttaagggaggcagaattcaagcattaactcttgaggttctatccttgactagccaggataatagggatttcacttagggaaagaattatggggcaaggggagaagggaatgaagaaatgcagtgttcagatttaggcatgttgagcttgaggcactattgcgatgctaagagagttgagggattctgattgtgaggctgggacagaaagaccagagcctcatggccctacttagaggtgaagagaagctctgcatgaaactgatcaaggtataagcctgaccaaaacgcttttgtaattggtgatgataagaataccaacacccttgaagtagaaaaaagccctgtaagaagaaggggtggggaaactagactgccatcactgctgttcatgatgagaaagtagaagtggcacagtagattaatcattagcagtgatagaagtaagagaggcagaatcctagtcaaaggctgtagaaagattgggaaggatgtgttgccttgcggtgacgtgaattagttttcaggcacagagacccagaaaagatagggagaaagaaggagaaagaacaatagagagtagataatagataatcttagaaaagagacaaataaattaagatcaatgtcaaaataggaacaatagtctggaagaatgaaagatgggggtaacccagaagaaacaatgaactttcttctgaatgggagacgaaagcaaaagaagggtcaaggaatggttcacaaaataaatgaaggatgaatgtttaacgcaagtctttaaaaatatgtagaaaatgcaaaaaggagtaaatacagtatgcacatgaatgtaagaattaccaagctataataagggttatacatgaattaaatgaatgttttgagggcacgatcaagaccacgttgttgcttttcccttaagcaagcttagcacatttcctcctcccgtggatgttcttcagtcagagggtggggaagactaaggacagaaggcatctagggcacgaggtgagagaaacgactgagcacaggacacaggctggtagggaagataagtgaatcccaaataggagtgctgagggctccaggatctcttgatcagatgagggaactggtaccactgaagaaagctcaagagaagtgcacttgctaggagaacccagatcccaactaagacgaagtacagagagcacttagggcactgattgagggtactggcgaatttagccacggtgggattgaagttgtctggtagtcagtggaaggattgggcggaggagtctaagtgagcacaagagagcagaaagcctgagaagtcagggaagagggaggagtttgcacctgtgaggataaaggcgatggagcctgagttgtaggtcaatcccttttgttcactcaggtctcaggatccagccaactggaaaaatcagtcatacttctccatctcagagggatgaagcagatcaacctaaacattcctctattgttccattctcgtggtccatttgtctaagactgtctcttccaggacaccaaaggccttgtttgaggaaagcatgtgtttgttgcgaggacatcgaattaaagttaaacttgcttgtctcctaagcctctgcctttaaatagtgaatgacttcctttgtcataaatgaaatcttcagtttacttggatgttactttgattcactatcttaggtctctgtcagggacctaagatagtgtcctctctaatcctcttgggtcctaaactagagaatcattctgactttcaccttcctcaacaccctgtccctctgctattagtccttgctcaacactgtctgttgcatccaacccttccttctataaccagtggtactacccccacccagattactattgttgacattacagaagaggtgcttgctgaggtcagtgtctccaggtggaggccagctaactctctctccagggctacctggatgaatttaccaattcattcaggctggccaatgcccaaagtccactggggaggctcagaatcacagtttcattagaaatctcagaaacggactcactaaccaagctcacaaatgctaaagcataagtaagaatctcaatgtagtaatattccgtaagaaatcctgcagccacacaggccagaatgactaatatattctctctctggcataactgtgtaggaagtctttgcagctgtgtttcctgctccagcaaaagtcctgcccataagactataaatcttcagtccaaaaagccaacacactacaactgccttttttatttccttccactgctaacaaattccagggatgactgccattttctttacatgtgctcgtagattccattcgattacagccaagccttgatggcctgggggaggttattctgtctctgtgtccaggttcttaaccttattgtgcataaaattaaatacagaggatgacaaaggaaaccaaatatgttgaaatgccattattaaaatattttttaaatcgccatatagtaatatatgtgcatctttattagttagaaaatctagccctgggtgtcataattttaaagtagtgatgagcataaagaatatttcaaaatgtatccatcaactatatgtgataggagtatgtctgtgatttctattggtgacaaagtcacagttactgctcataactactctggcttattatctacattcataatttaagaaaatgctaaattgcaatcagaggtttgtataaagatgtaatttttttctcatccagtaatcacaggtttcctgaattctgctcacagacatcaaggatctgtggatcccgggttaagagccccgactgagttgatgtggcatgtctctgctttcctcgcgacatgctgatttcttagtgtatctctcacatcacagtttctaagttcttgggcaagtcattccatttcataaatactacctatcattattaggtatattctccatctttgcaagaacattgttttttacatttgaaaatgtatgagacgatcaccaaaaactggaaacaactgaaatgtttgctaagtggtgaactgataaattgcagtatatctactccattgaatactactagtaaattaaagaaaaaattaataaaaacatgcaacaacatagaggaatgttaaaaggaattatgccaacttcaagaagccacactgacaacgctatttactgcaggactcaatgggtatgacattgtggaacaggcaaaactatagccacagaaaacaaatgagtggttgccaggggctgggaggaaggaggaaattcactacaaaatggtgtgagaaaactttctggatggaaatattacaactcttgattctgttgttaattacatgacttacatacatttgtcaaaattcatataactgtacacctaaaaaagaattttaccatatgtaaattatagtgcaatatatcttttaaaagtatgataaaatatattcagaccttcacataatagaggtctttttaataacatttcactgagaaaatacaagtgtgcatgtagactcgagaatctgcaataactccagaagggcaggggtgcaggtaaccttgacccacaggctgcaccctactgattacacaactatattagtgtcctaaatggccacttagcctgtatatttttctcctccaggctcttccgggctcagtctctccagtttccatcctgttgttctgtcagtaacccagaactctcaataacctcttttaatttttgttctgtcaataacccagaactctcagaactctcaataacccctttatatagacttgttagtggaaaggactttgaaggtcatgaatttccaactctgactcactgctgagccccatccccagtactcctgcctgaggtcagcgagcttctacctgggtaccctagtggcaatggggttccccacctcatgaggtagagtgctctatgggtaataaccctgaattactagataggtttatgttcttacttacagagaaaactcaaacttctcgggagagcactaaagatcttccacagtctgactccaaatggcgtctctggctcatctcattaggttcatctaatccacacggtaggccctgctctactccttgttctcaggccatgcctagtgttcttccacttttgcacctgcactcattctggtttctatgtcttgtaaaacagattgtcttgtcctgtaaactcagtgctcagagacactccctcatccttccttctctaaagagactccaagagtccaataacatctatgatagcaataacaaatatcatagccaaacactcttaactaggcctcagtgtgttatgctgaaattcccaaaccaggtgtaataaatggtttacaggaatggtcccttctgcccttggagttgccaaatgaggcctggggaagctggattccctgggctcattatctccaaatggagaaatctcttccatttatcccaaaatgctaatacacacacacacacacacacacacacacacacacacacacaaaataaatatgtgtgtatatataatatatataattttatctatataaaaattatttttatgcatgtggaaaactgaagaagcacagcattcagatgtctctagggcccagactccatcagatcccaggctctagaactgctcctacccctcctgacctgcttgttccattgtctccatgactatcccactgcctcactcctggtccgaccctctcaccctagctcattaacattgatgcttcgtcagattctacgcttggttactactcctaggttctggattttcctccattcctagtgccacagcactcatgccattaatttcttcttccatccccatcaacttgaagctctcaaatgctttccgacttgtatgggagaggaattccacacactgctcctttttcctctgtagattctatttctccttgatgatcaagcttcaatctcacctcttcacagacagcttccgagatcccaaagtcacttcctccctctgtgaattaccatccacctcatcaactgtttcctgttgactgggcatattttttcctacttcttcaacttttattttaagttcaggggtacatgtgcaggatgtgcaggtttgttacataggtaaaagtgtgccacggtggtttgctacacagatcatcccatcacctaagtagtaagcccagcgtccattagctattcttcctgatgctctccctcccccacttgcccctcctccagcaggccccagtgtgtgttgttccccccatgtgtccacgtgttttcatcattcagctcccacttataagtgacaacatgtggtaattggccttctgtttctgcgttcgtttgctgaggataatgtcttccaactccatccatgtccccgcaaagagcatgatctcattcctttttatttctgcatagcattccatggtgtgtgtatgccacattttctttattcaatttatcattgatgggcatttgggttgattccatgtctctgctattgtgaatagtgctgcaatgaatatacgcatgcatgtgtctttataatagaatgatttatattcctttgagtatatacccagtcatgggattgctgggtcaaatggtatttctgcctctagatctttgaggagttgccacactgtcttccacaattgttgaactaatttacactcacaccaacagtgtaaaagcgttcctttttctctgcaacctcaccagcatctgttgttttttgactttttaatagtagccattctgacaggtgtgagatgatatctcagtgtagttttgatttgtatttctctaaggaccagtgatgttgagcattttttcatacgtacatattcttaataattaaattataagcaatttgaaggcacatgcctctcttgatagctcccatagtgatggctagctagcacagtggctcacattaggaagatgcttaatagttgcttcttttaaattagttgctgaatttaaaatatctctctcagttccaaggttgaaagaaaatagaagtagccaaaatctatatcctgaaccacgcacaatggattatggccacagaatcagtacagctgatctaagggatatgtaagtacagacacagagtcaaccaaataaatcctctttaattctggctggcgcgattgacacataccccaatgcagtctcttggtaaatggggtaagttattaaatatcgcaaggatgtgtttggagaggaaatggtatatatcatatcaggtatccagaaggccacaccccacttcctccttccttcgcagatcatggccagagaggccacctaagtggcctccaactttgagcttgttttgctacactagctgcatgagagctccggggggaaggcggggggtggataaaagaagcccaaaggaaacctgccaaatagattcttttaaaaaataccttaaaaatttaaacttcctcttttgtctgcatatccaccccataggtaggggtggatgagctttgagtaattctagaagccaaaactattaactgtgtctaataactgtttatggataaaatcttctaacacgtgtgtgatcactaagacagatacgaacctggaccaagacatgggtgtcttgcctgaatcatcagagctactgatatacaacaaaatcccccagatagtgacaggtgtgttctcaagccatgggtgagactgaagttgccactcttggttatacagtccccaaatatggggcatggcagcacacaggctaagagttgtggaagattcttatacaagggagttctcaatggttgttcccaaccaggttggcccccaaaattcaaccaagaaactcaaactacaattaacaaaaataaaatatggtctaattaatatatcctagataatgtttgcctttacttggatggctatttacatggacaagggaagaagggaagataagggaaaaggctttttatgtgtttattcaacaatggcggaggagaggcatgccagataaggcagacacgggcattccaaacacaagaaaggtatgtgctgcagagaagtcagataactttcctaggctctcctgcagtccggatgaaatactctcaaaaaattagcccgggccctttgctccaatttttcgcttacctagcaaccatctaactattaattaaattggtattatggttttaacatgaatcttttatgatttgcttaccattaatcaaacccccgaggcttattcacctcaaggggagctgacaaagttgaattattcaacctgcaaagatccagggcccccaaatactgtcatttccactctcccctaacccccaccatgaggcccagtctcagcactcggccagcctatgcccaactcggggtaatcagcttagacatattaatattagtgggcatttcagtatcaacagatcactgtctagcagctgacaggcaccctcagaaaataaaccaagaagaaagggtttatctataatatcaaaatttttcatagataaacctgcccattataaggaagagggcagaagaaccctaaactaagagccaggcaacttgttcattaatcacagcatattccatagaaggaggagaaatgttgtcatcaaattcatctttttcacctcaattaaacatctatgctacagctccacagtcagattgagaggaaaaacagtacgtagctaagaaaagacatagacttgtaactgaaatgcttcactggtgctccttttgttttaaggcattggatcttcatagctactgatcgtgcccaagcacacagtatctgcagcaaccacttaggcctccaggaatgtggtgaccattgaccctaattcattccccttcatggatcctatgtaaccatcctccaaaaagagctttcgcaaactcaaataaacacaggaaaggaagaccttcttatctttgagagtatatgtttagccctataaccctctcttatcataaattgcttcttaggcaagaaacactggatttttcttgtatttgtcattgccattggttccatacaagcattcatttaacaaataatacattccatctccgttttttgctttttccttcatgcttcggccttggttttctctcacctaaaacactacaagcttcttctcccagagctctcactttgactccagactacctacatttaatctttaattctctaccaaaattttctcttatctttatatctttttaattttaattttattttttgtggatacatagtaggtgtatatatttatggggtacatgcaatgttttaatacaggcatgcaatgtgaaataaggacatcatggagaatggggtatccatctcctcaagcatttatcttttcagttacaaacaatccaattacactctttattttaaaatatacaattattaattatagtcactctgttgtgctatcaaatagtagatcttattctttctattttttgtaccctctcgtctttttatattaaaaaataatctttatctctgtaagcttcatcagtgattttccaatgaaatttaggatcttctctataccctgaattgccttactttctccccacttccttgtcttattcaaatgcagatttcattaatgatttccagatcaatgatagttcagaaagcaagcaagtcaaagtgaccaagggcatggcctgaaaactgttctaagagaggaatttacagaacaactattaaatgatgtcaataggattgtattagtccgttttcatacggctataaagaactgcctgagactgggtaatttataaaggaaagaggtttaattgactcacagttcagcacaactgggcaggcctcaggaaacttacaatcatggtagaaggtgaaggggaagcaaagcaccttcctcacaaggcgtcaggaagaagtgccaagcaaagggggaaaagccccttgtaaaactaccagaacctgtgagaactcaatcactatcacaagaacagcatgagggaaccgcccctcgtgattcaattacctccacctggtctctcccttgacacatggggattatgggtgttacaattcaagatgagatttgggtggggacacaaagcctaaccatatcaaggatcaagtggtgggttgaaactaacaggatgagatatatcagatacaaacacagggtcccatatttgggttaaaattcataaatgatcaaagcacaggatgacagataatataggtcattttagattattgtggccaacagatcacagtgggtagtgttatgacgaagggagggtcacagttactacagttacagatggattctgggtacaacatttgcactaaagtgcctttgccaagggaggcaacagtctcgacatcctgtggcctgatctacttcagggactgtgtcttgttcagagcatcacatttgaagagaactttgaccaaggggaatatgccagaaaaggaagttcgggatgctgaggatcttaggaactatgtctaaacaagattcattcacagaagtgggaatgtctatttggcaaaaagaaaatactacttacatggctgttggaagaccagcaatcacaaactcagtttttcaaaaggctgggcagaaacacagatgaaagaaacaggccatgtttaagaaaagataaaagctcacgcatgatatgccactagagaatcacctagcctcagtgttggcggggaggcctggggagtcttgatgtctgagagtgacattctgatgatcactgtcatgtgtaaatgttggcctaaagctgccaatatttttgatttaagagaagcaagaaatgcaaatttttatgcagcatgtctcaatttttaattttggcaactattacaaaatgtttaaagagactctgtgcagcccaaatataacatatctatgggctgatggcagcccagcgttgccagttcacagggtctacaagag

SEQ ID NO: 1218 - DNA, 30 bp, Homo sapiens
  source 1..30: mol_type = genomic DNA
gtccactcattcttggcaggatggcttctc

SEQ ID NO: 1219 - DNA, 30 bp, Homo sapiens
  source 1..30: mol_type = genomic DNA
ctccagactcactggttttcctataaggtg

SEQ ID NO: 1220 - RNA, 20 nt, synthetic construct
  source 1..20: mol_type = other RNA
tactcacctctgcatgctca

SEQ ID NO: 1221 - DNA, 30 bp, Homo sapiens
  source 1..30: mol_type = genomic DNA
ttccatgagcatgcagaggtgagtatacag

SEQ ID NO: 1222 - DNA, 29 bp, Homo sapiens
  source 1..29: mol_type = genomic DNA
gtccactcattcttggcaggatggcttct

SEQ ID NO: 1223 - DNA, 29 bp, Homo sapiens
  source 1..29: mol_type = genomic DNA
gtccactcgttcttggcaggatggcttct

SEQ ID NO: 1224 - RNA, 20 nt, synthetic construct
  source 1..20: mol_type = other RNA
ctgagtgaccaaaaggatat

SEQ ID NO: 1225 - DNA, 29 bp, Homo sapiens
  source 1..29: mol_type = genomic DNA
gtggaatatccttttggtcactcagacct

SEQ ID NO: 1226 - DNA, 226 bp, Homo sapiens
  source 1..226: mol_type = genomic DNA
ttccgatgctctaatctctctagacaaggttcatatttgtatgggttacttattctctctttgttgactaagtcaataatcagaatcagcaggtttgcagtcagattggcagggataagcagcctagctcaggagaagtgagtataaaagccccaggctgggagcagccatcacagaagtccactcattcttggcaggatggcttctcatcgtctgctcctcctct

SEQ ID NO: 1227 - protein, 9 aa, Homo sapiens
MASHRLLLL

SEQ ID NO: 1228 - DNA, 218 bp, Homo sapiens
  source 1..218: mol_type = genomic DNA
ttccgatgctctaatctctctagacaaggttcatatttgtatgggttacttattctctctttgttgactaagtcaataatcagaatcagcaggtttgcagtcagattggcagggataagcagcctagctcaggagaagtgagtataaaagccccaggctgggagcagccatcacagaagtccactcattcttggcaggatggcttctcatcgtctgct

SEQ ID NO: 1229 - DNA, 251 bp, Homo sapiens
  source 1..251: mol_type = genomic DNA
ttccgatgctctaatctctctagacaaggttcatatttgtatgggttacttattctctctttgttgactaagtcaataatcagaatcagcaggtttgcagtcagattggcagggataagcagcctagctcaggagaagtgagtataaaagccccaggctgggagcagccatcacagaagtccactcattcttggcaggatggcttctcatcgtctgctcctcctctgccttgctggactggtatttgtgtc

SEQ ID NO: 1230 - protein, 18 aa, Homo sapiens
MASHRLLLLCLAGLVFVS

What is claimed:

1. A lipid nanoparticle (LNP) comprising a guide polynucleotide comprising a sequence selected from any one or more of the following:

| | | SEQ ID |
|---|---|---|
| gRNA ID | SEQUENCE | NO |
| gRNA_361 | UAUAGGAAAACCAGTGAGTCGUUUUAGAGCUAGAAAUAGCAAGUUAAA | 479 |
| | AUAAGGCUAGUCCGUUAUCAACUUGAAAAAGUGGCACCGAGUCGGUGC | |
| | UUUU | |
| gRNA_362 | UACUCACCUCUGCAUGCUCAGUUUUAGAGCUAGAAAUAGCAAGUUAAA | 480 |
| | AUAAGGCUAGUCCGUUAUCAACUUGAAAAAGUGGCACCGAGUCGGUGC | |
| | UUUU | |
| gRNA_363 | ACUCACCUCUGCAUGCUCAUGUUUUAGAGCUAGAAAUAGCAAGUUAAA | 481 |
| | AUAAGGCUAGUCCGUUAUCAACUUGAAAAAGUGGCACCGAGUCGGUGC | |
| | UUUU | |
| gRNA_364 | UACCACCUAUGAGAGAAGACGUUUUAGAGCUAGAAAUAGCAAGUUAAA | 482 |
| | AUAAGGCUAGUCCGUUAUCAACUUGAAAAAGUGGCACCGAGUCGGUGC | |
| | UUUU | |
| gRNA_365 | AUACUCACCUCUGCAUGCUCAGUUUUAGUACUCUGUAAUGAAAAUUAC | 483 |
| | AGAAUCUACUAAAACAAGGCAAAAUGCCGUGUUUAUCUCGUCAACUUG | |
| | UUGGCGAGAUUUU | |
| gRNA_366 | ACUGGUUUUCCUAUAAGGUGUGUUUUAGUACUCUGUAAUGAAAAUUAC | 484 |
| | AGAAUCUACUAAAACAAGGCAAAAUGCCGUGUUUAUCUCGUCAACUUG | |
| | UUGGCGAGAUUUU | |
| gRNA_367 | GUUCUGUCUUUUGGUCAGGACAACCGUCUAGCUAUAAGUGCUGCAGGG | 485 |
| | UGUGAGAAACUCCUAUUGCUGGACGAUGUCUCUUACGAGGCAUUAGCA | |
| | CUUGGCAGGAUGGCUUCUCAUCG | |
| gRNA_368 | GUUCUGUCUUUUGGUCAGGACAACCGUCUAGCUAUAAGUGCUGCAGGG | 486 |
| | UGUGAGAAACUCCUAUUGCUGGACGAUGUCUCUUACGAGGCAUUAGCA | |
| | CUCCUAUAAGGUGUGAAAGUCUG | |
| gRNA_369 | GUUCUGUCUUUUGGUCAGGACAACCGUCUAGCUAUAAGUGCUGCAGGG | 487 |
| | UGUGAGAAACUCCUAUUGCUGGACGAUGUCUCUUACGAGGCAUUAGCA | |
| | CUGAGCCCAUGCAGCUCUCCAGA | |
| gRNA_370 | GUUCUGUCUUUUGGUCAGGACAACCGUCUAGCUAUAAGUGCUGCAGGG | 488 |
| | UGUGAGAAACUCCUAUUGCUGGACGAUGUCUCUUACGAGGCAUUAGCA | |
| | CCUCCUCAGUUGUGAGCCCAUGC | |
| gRNA_371 | GUUCUGUCUUUUGGUCAGGACAACCGUCUAGCUAUAAGUGCUGCAGGG | 489 |
| | UGUGAGAAACUCCUAUUGCUGGACGAUGUCUCUUACGAGGCAUUAGCA | |
| | CGUAGAAGGGAUAUACAAAGUGG | |
| gRNA_372 | GUUCUGUCUUUUGGUCAGGACAACCGUCUAGCUAUAAGUGCUGCAGGG | 490 |
| | UGUGAGAAACUCCUAUUGCUGGACGAUGUCUCUUACGAGGCAUUAGCA | |
| | CCCACUUUGUAUAUCCCUUCUAC | |
| gRNA_373 | GUUCUGUCUUUUGGUCAGGACAACCGUCUAGCUAUAAGUGCUGCAGGG | 491 |
| | UGUGAGAAACUCCUAUUGCUGGACGAUGUCUCUUACGAGGCAUUAGCA | |
| | CGGUGUCUAUUUCCACUUUGUAU | |
| gRNA_374 | GUUCUGUCUUUUGGUCAGGACAACCGUCUAGCUAUAAGUGCUGCAGGG | 492 |
| | UGUGAGAAACUCCUAUUGCUGGACGAUGUCUCUUACGAGGCAUUAGCA | |
| | CCAUGAGCAUGCAGAGGUGAGUA | |
| gRNA1594 | CAACUUACCCAGAGGCAAAUGUUUUAGAGCUAGAAAUAGCAAGUUAAA | 493 |
| | AUAAGGCUAGUCCGUUAUCAACUUGAAAAAGUGGCACCGAGUCGGUGC | |
| | UUUU | |
| gRNA1595 | AAUGGCUCCCAGGUGUCAUCGUUUUAGAGCUAGAAAUAGCAAGUUAAA | 494 |
| | AUAAGGCUAGUCCGUUAUCAACUUGAAAAAGUGGCACCGAGUCGGUGC | |
| | UUUU | |
| gRNA1596 | GGCUCCCAGGUGUCAUCAGCGUUUUAGAGCUAGAAAUAGCAAGUUAAA | 495 |
| | AUAAGGCUAGUCCGUUAUCAACUUGAAAAAGUGGCACCGAGUCGGUGC | |
| | UUUU | |
| gRNA1597 | CUCUCAUAGGUGGUAUUCACGUUUUAGAGCUAGAAAUAGCAAGUUAAA | 496 |
| | AUAAGGCUAGUCCGUUAUCAACUUGAAAAAGUGGCACCGAGUCGGUGC | |
| | UUUU | |
| gRNA1598 | UAUAGGAAAACCAGUGAGUCGUUUUAGAGCUAGAAAUAGCAAGUUAAA | 497 |
| | AUAAGGCUAGUCCGUUAUCAACUUGAAAAAGUGGCACCGAGUCGGUGC | |
| | UUUU | |
| gRNA1599 | UACUCACCUCUGCAUGCUCAGUUUUAGAGCUAGAAAUAGCAAGUUAAA | 480 |
| | AUAAGGCUAGUCCGUUAUCAACUUGAAAAAGUGGCACCGAGUCGGUGC | |
| | UUUU | |
| gRNA1600 | GCAACUUACCCAGAGGCAAAGUUUUAGAGCUAGAAAUAGCAAGUUAAA | 499 |
| | AUAAGGCUAGUCCGUUAUCAACUUGAAAAAGUGGCACCGAGUCGGUGC | |
| | UUUU | |
| gRNA1601 | UCUGUAUACUCACCUCUGCAGUUUUAGAGCUAGAAAUAGCAAGUUAAA | 500 |
| | AUAAGGCUAGUCCGUUAUCAACUUGAAAAAGUGGCACCGAGUCGGUGC | |
| | UUUU | |
| gRNA1602 | GAAACACUCACCGUAGGGCCGUUUUAGAGCUAGAAAUAGCAAGUUAAA | 501 |
| | AUAAGGCUAGUCCGUUAUCAACUUGAAAAAGUGGCACCGAGUCGGUGC | |
| | UUUU | |
| gRNA1603 | CUCUACACCCAGGGCACCGGGUUUUAGAGCUAGAAAUAGCAAGUUAAA | 502 |
| | AUAAGGCUAGUCCGUUAUCAACUUGAAAAAGUGGCACCGAGUCGGUGC | |
| | UUUU | |
| gRNA1604 | ACACCUUAUAGGAAAACCAGGUUUUAGAGCUAGAAAUAGCAAGUUAAA | 503 |
| | AUAAGGCUAGUCCGUUAUCAACUUGAAAAAGUGGCACCGAGUCGGUGC | |
| | UUUU | |
| gRNA1605 | AUAGGAAAACCAGUGAGUCUGUUUUAGAGCUAGAAAUAGCAAGUUAAA | 504 |
| | AUAAGGCUAGUCCGUUAUCAACUUGAAAAAGUGGCACCGAGUCGGUGC | |
| | UUUU | |
| gRNA1606 | ACUCACCUCUGCAUGCUCAUGUUUUAGAGCUAGAAAUAGCAAGUUAAA | 481 |
| | AUAAGGCUAGUCCGUUAUCAACUUGAAAAAGUGGCACCGAGUCGGUGC | |
| | UUUU | |
| gRNA1607 | CUCACCGUAGGGCCAGCCUCGUUUUAGAGCUAGAAAUAGCAAGUUAAA | 506 |
| | AUAAGGCUAGUCCGUUAUCAACUUGAAAAAGUGGCACCGAGUCGGUGC | |
| | UUUU | |
| gRNA1746 | AACCUGCUGAUUCUGAUUAUGUUUUAGAGCUAGAAAUAGCAAGUUAAA | 507 |
| | AUAAGGCUAGUCCGUUAUCAACUUGAAAAAGUGGCACCGAGUCGGUGC | |
| | UUUU | |
| gRNA1747 | AAGAGAGAAUAAGUAACCCAUGUUUUAGUACUCUGUAAUGAAAAUUAC | 508 |
| | AGAAUCUACUAAAACAAGGCAAAAUGCCGUGUUUAUCUCGUCAACUUG | |
| | UUGGCGAGAUUUU | |
| gRNA1748 | AAGCAGCCUAGCUCAGGAGAAGUUUUAGUACUCUGUAAUGAAAAUUAC | 509 |
| | AGAAUCUACUAAAACAAGGCAAAAUGCCGUGUUUAUCUCGUCAACUUG | |
| | UUGGCGAGAUUUU | |
| gRNA1749 | AAGUCCACUCAUUCUUGGCAGUUUUAGAGCUAGAAAUAGCAAGUUAAA | 510 |
| | AUAAGGCUAGUCCGUUAUCAACUUGAAAAAGUGGCACCGAGUCGGUGC | |
| | UUUU | |
| gRNA1750 | ACGAUGAGAAGCCAUCCUGCCGUUUUAGUACUCUGUAAUGAAAAUUAC | 511 |
| | AGAAUCUACUAAAACAAGGCAAAAUGCCGUGUUUAUCUCGUCAACUUG | |
| | UUGGCGAGAUUUU | |
| gRNA1751 | AGACAAGGUUCAUAUUUGUAGUUUUAGAGCUAGAAAUAGCAAGUUAAA | 512 |
| | AUAAGGCUAGUCCGUUAUCAACUUGAAAAAGUGGCACCGAGUCGGUGC | |
| | UUUU | |
| gRNA1752 | AGGCUGGGAGCAGCCAUCACGUUUUAGAGCUAGAAAUAGCAAGUUAAA | 513 |
| | AUAAGGCUAGUCCGUUAUCAACUUGAAAAAGUGGCACCGAGUCGGUGC | |
| | UUUU | |
| gRNA1753 | AUAAGUAACCCAUACAAAUAGUUUUAGAGCUAGAAAUAGCAAGUUAAA | 514 |
| | AUAAGGCUAGUCCGUUAUCAACUUGAAAAAGUGGCACCGAGUCGGUGC | |
| | UUUU | |
| gRNA1754 | AUACUCACUUCUCCUGAGCUGUUUUAGAGCUAGAAAUAGCAAGUUAAA | 515 |
| | AUAAGGCUAGUCCGUUAUCAACUUGAAAAAGUGGCACCGAGUCGGUGC | |
| | UUUU | |
| gRNA1755 | AUUAUUGACUUAGUCAACAAGUUUUAGAGCUAGAAAUAGCAAGUUAAA | 516 |
| | AUAAGGCUAGUCCGUUAUCAACUUGAAAAAGUGGCACCGAGUCGGUGC | |
| | UUUU | |
| gRNA1756 | CAAAUAUGAACCUUGUCUAGGUUUUAGAGCUAGAAAUAGCAAGUUAAA | 517 |
| | AUAAGGCUAGUCCGUUAUCAACUUGAAAAAGUGGCACCGAGUCGGUGC | |
| | UUUU | |
| gRNA1757 | CAGAAGUCCACUCAUUCUUGGGUUUUAGUACUCUGUAAUGAAAAUUAC | 518 |
| | AGAAUCUACUAAAACAAGGCAAAAUGCCGUGUUUAUCUCGUCAACUUG | |
| | UUGGCGAGAUUUU | |
| gRNA1758 | CAGGCUGGGAGCAGCCAUCACGUUUUAGUACUCUGUAAUGAAAAUUAC | 519 |
| | AGAAUCUACUAAAACAAGGCAAAAUGCCGUGUUUAUCUCGUCAACUUG | |
| | UUGGCGAGAUUUU | |
| gRNA1759 | CCAUCCUGCCAAGAAUGAGUGUUUUAGAGCUAGAAAUAGCAAGUUAAA | 520 |
| | AUAAGGCUAGUCCGUUAUCAACUUGAAAAAGUGGCACCGAGUCGGUGC | |
| | UUUU | |
| gRNA1760 | CCUGCUGAUUCUGAUUAUUGAGUUUUAGUACUCUGUAAUGAAAAUUAC | 521 |
| | AGAAUCUACUAAAACAAGGCAAAAUGCCGUGUUUAUCUCGUCAACUUG | |
| | UUGGCGAGAUUUU | |
| gRNA1761 | CGAUGCUCUAAUCUCUCUAGAGUUUUAGUACUCUGUAAUGAAAAUUAC | 522 |
| | AGAAUCUACUAAAACAAGGCAAAAUGCCGUGUUUAUCUCGUCAACUUG | |
| | UUGGCGAGAUUUU | |
| gRNA1762 | CUAAGUCAAUAAUCAGAAUCAGUUUUAGUACUCUGUAAUGAAAAUUAC | 523 |
| | AGAAUCUACUAAAACAAGGCAAAAUGCCGUGUUUAUCUCGUCAACUUG | |
| | UUGGCGAGAUUUU | |
| gRNA1763 | CUAGACAAGGUUCAUAUUUGUGUUUUAGUACUCUGUAAUGAAAAUUAC | 524 |
| | AGAAUCUACUAAAACAAGGCAAAAUGCCGUGUUUAUCUCGUCAACUUG | |
| | UUGGCGAGAUUUU | |
| gRNA1764 | GAACCUUGUCUAGAGAGAUUGUUUUAGAGCUAGAAAUAGCAAGUUAAA | 525 |
| | AUAAGGCUAGUCCGUUAUCAACUUGAAAAAGUGGCACCGAGUCGGUGC | |
| | UUUU | |
| gRNA1765 | GAAGUCCACUCAUUCUUGGCGUUUUAGAGCUAGAAAUAGCAAGUUAAA | 526 |
| | AUAAGGCUAGUCCGUUAUCAACUUGAAAAAGUGGCACCGAGUCGGUGC | |
| | UUUU | |
| gRNA1766 | GAAUCAGCAGGUUUGCAGUCGUUUUAGAGCUAGAAAUAGCAAGUUAAA | 527 |
| | AUAAGGCUAGUCCGUUAUCAACUUGAAAAAGUGGCACCGAGUCGGUGC | |
| | UUUU | |
| gRNA1767 | GAAUGAGUGGACUUCUGUGAGUUUUAGAGCUAGAAAUAGCAAGUUAAA | 528 |
| | AUAAGGCUAGUCCGUUAUCAACUUGAAAAAGUGGCACCGAGUCGGUGC | |
| | UUUU | |
| gRNA1768 | GACUGCAAACCUGCUGAUUCGUUUUAGAGCUAGAAAUAGCAAGUUAAA | 529 |
| | AUAAGGCUAGUCCGUUAUCAACUUGAAAAAGUGGCACCGAGUCGGUGC | |
| | UUUU | |
| gRNA1769 | GACUUAGUCAACAAAGAGAGAGUUUUAGUACUCUGUAAUGAAAAUUAC | 530 |
| | AGAAUCUACUAAAACAAGGCAAAAUGCCGUGUUUAUCUCGUCAACUUG | |
| | UUGGCGAGAUUUU | |
| gRNA1770 | GAUAAGCAGCCUAGCUCAGGGUUUUAGAGCUAGAAAUAGCAAGUUAAA | 531 |
| | AUAAGGCUAGUCCGUUAUCAACUUGAAAAAGUGGCACCGAGUCGGUGC | |
| | UUUU | |
| gRNA1771 | GAUGAGAAGCCAUCCUGCCAGUUUUAGAGCUAGAAAUAGCAAGUUAAA | 532 |
| | AUAAGGCUAGUCCGUUAUCAACUUGAAAAAGUGGCACCGAGUCGGUGC | |
| | UUUU | |
| gRNA1773 | GCUUUUAUACUCACUUCUCCGUUUUAGAGCUAGAAAUAGCAAGUUAAA | 534 |
| | AUAAGGCUAGUCCGUUAUCAACUUGAAAAAGUGGCACCGAGUCGGUGC | |
| | UUUU | |
| gRNA1774 | GGAUAAGCAGCCUAGCUCAGGGUUUUAGUACUCUGUAAUGAAAAUUAC | 535 |
| | AGAAUCUACUAAAACAAGGCAAAAUGCCGUGUUUAUCUCGUCAACUUG | |
| | UUGGCGAGAUUUU | |
| gRNA1775 | GUCUAGAGAGAUUAGAGCAUGUUUUAGAGCUAGAAAUAGCAAGUUAAA | 536 |
| | AUAAGGCUAGUCCGUUAUCAACUUGAAAAAGUGGCACCGAGUCGGUGC | |
| | UUUU | |
| gRNA1776 | GUGAUGGCUGCUCCCAGCCUGUUUUAGAGCUAGAAAUAGCAAGUUAAA | 537 |
| | AUAAGGCUAGUCCGUUAUCAACUUGAAAAAGUGGCACCGAGUCGGUGC | |
| | UUUU | |
| gRNA1777 | UACUUAUUCUCUCUUUGUUGAGUUUUAGUACUCUGUAAUGAAAAUUAC | 538 |
| | AGAAUCUACUAAAACAAGGCAAAAUGCCGUGUUUAUCUCGUCAACUUG | |
| | UUGGCGAGAUUUU | |
| gRNA1778 | UAUUCUCUCUUUGUUGACUAAGUUUUAGUACUCUGUAAUGAAAAUUAC | 539 |
| | AGAAUCUACUAAAACAAGGCAAAAUGCCGUGUUUAUCUCGUCAACUUG | |
| | UUGGCGAGAUUUU | |
| gRNA1779 | UAUUGACUUAGUCAACAAAGGUUUUAGAGCUAGAAAUAGCAAGUUAAA | 540 |
| | AUAAGGCUAGUCCGUUAUCAACUUGAAAAAGUGGCACCGAGUCGGUGC | |
| | UUUU | |
| gRNA1780 | UAUUGACUUAGUCAACAAAGAGUUUUAGUACUCUGUAAUGAAAAUUAC | 541 |
| | AGAAUCUACUAAAACAAGGCAAAAUGCCGUGUUUAUCUCGUCAACUUG | |
| | UUGGCGAGAUUUU | |
| gRNA1781 | UCAGAAUCAGCAGGUUUGCAGGUUUUAGUACUCUGUAAUGAAAAUUAC | 542 |
| | AGAAUCUACUAAAACAAGGCAAAAUGCCGUGUUUAUCUCGUCAACUUG | |
| | UUGGCGAGAUUUU | |
| gRNA1782 | UCCACUCAUUCUUGGCAGGAGUUUUAGAGCUAGAAAUAGCAAGUUAAA | 543 |
| | AUAAGGCUAGUCCGUUAUCAACUUGAAAAAGUGGCACCGAGUCGGUGC | |
| | UUUU | |
| gRNA1783 | UCUCUCUUUGUUGACUAAGUCGUUUUAGUACUCUGUAAUGAAAAUUAC | 544 |
| | AGAAUCUACUAAAACAAGGCAAAAUGCCGUGUUUAUCUCGUCAACUUG | |
| | UUGGCGAGAUUUU | |
| gRNA1784 | UGAGAAGCCAUCCUGCCAAGAGUUUUAGUACUCUGUAAUGAAAAUUAC | 545 |
| | AGAAUCUACUAAAACAAGGCAAAAUGCCGUGUUUAUCUCGUCAACUUG | |
| | UUGGCGAGAUUUU | |
| gRNA1785 | UGAGCUAGGCUGCUUAUCCCUGUUUUAGUACUCUGUAAUGAAAAUUAC | 546 |
| | AGAAUCUACUAAAACAAGGCAAAAUGCCGUGUUUAUCUCGUCAACUUG | |
| | UUGGCGAGAUUUU | |
| gRNA1786 | UGAGUAUAAAAGCCCCAGGCGUUUUAGAGCUAGAAAUAGCAAGUUAAA | 547 |
| | AUAAGGCUAGUCCGUUAUCAACUUGAAAAAGUGGCACCGAGUCGGUGC | |
| | UUUU | |
| gRNA1787 | UGAUGGCUGCUCCCAGCCUGGUUUUAGAGCUAGAAAUAGCAAGUUAAA | 548 |
| | AUAAGGCUAGUCCGUUAUCAACUUGAAAAAGUGGCACCGAGUCGGUGC | |
| | UUUU | |
| gRNA1788 | UGCCAAGAAUGAGUGGACUUCGUUUUAGUACUCUGUAAUGAAAAUUAC | 549 |
| | AGAAUCUACUAAAACAAGGCAAAAUGCCGUGUUUAUCUCGUCAACUUG | |
| | UUGGCGAGAUUUU | |
| gRNA1789 | UGCCAAUCUGACUGCAAACCUGUUUUAGUACUCUGUAAUGAAAAUUAC | 550 |
| | AGAAUCUACUAAAACAAGGCAAAAUGCCGUGUUUAUCUCGUCAACUUG | |
| | UUGGCGAGAUUUU | |
| gRNA1790 | UGUUGACUAAGUCAAUAAUCGUUUUAGAGCUAGAAAUAGCAAGUUAAA | 551 |
| | AUAAGGCUAGUCCGUUAUCAACUUGAAAAAGUGGCACCGAGUCGGUGC | |
| | UUUU | |
| gRNA1791 | UUGACUUAGUCAACAAAGAGGUUUUAGAGCUAGAAAUAGCAAGUUAAA | 552 |
| | AUAAGGCUAGUCCGUUAUCAACUUGAAAAAGUGGCACCGAGUCGGUGC | |
| | UUUU | |
| gRNA1792 | UUUGUUGACUAAGUCAAUAAUGUUUUAGUACUCUGUAAUGAAAAUUAC | 553 |
| | AGAAUCUACUAAAACAAGGCAAAAUGCCGUGUUUAUCUCGUCAACUUG | |
| | UUGGCGAGAUUUU | |
| gRNA-#1 | AAAAGCCCCAGGCUGGGAGCGUUUUAGAGCUAGAAAUAGCAAGUUAAA | 554 |
| | AUAAGGCUAGUCCGUUAUCAACUUGAAAAAGUGGCACCGAGUCGGUGC | |
| | UUUU | |
| gRNA-#2 | AAGUGAGUAUAAAAGCCCCAGUUUUAGAGCUAGAAAUAGCAAGUUAAA | 555 |
| | AUAAGGCUAGUCCGUUAUCAACUUGAAAAAGUGGCACCGAGUCGGUGC | |
| | UUUU | |
| gRNA-#3 | AAUAAUCAGAAUCAGCAGGUUGUUUUAGUACUCUGUAAUGAAAAUUAC | 556 |
| | AGAAUCUACUAAAACAAGGCAAAAUGCCGUGUUUAUCUCGUCAACUUG | |
| | UUGGCGAGAUUUU | |
| gRNA-#4 | AAUAUGAACCUUGUCUAGAGGUUUUAGAGCUAGAAAUAGCAAGUUAAA | 557 |
| | AUAAGGCUAGUCCGUUAUCAACUUGAAAAAGUGGCACCGAGUCGGUGC | |
| | UUUU | |
| gRNA-#5 | AAUGAGUGGACUUCUGUGAUGUUUUAGAGCUAGAAAUAGCAAGUUAAA | 558 |
| | AUAAGGCUAGUCCGUUAUCAACUUGAAAAAGUGGCACCGAGUCGGUGC | |
| | UUUU | |
| gRNA-#6 | ACAAAUAUGAACCUUGUCUAGGUUUUAGUACUCUGUAAUGAAAAUUAC | 559 |
| | AGAAUCUACUAAAACAAGGCAAAAUGCCGUGUUUAUCUCGUCAACUUG | |
| | UUGGCGAGAUUUU | |
| gRNA-#7 | ACAGAAGUCCACUCAUUCUUGUUUUAGAGCUAGAAAUAGCAAGUUAAA | 560 |
| | AUAAGGCUAGUCCGUUAUCAACUUGAAAAAGUGGCACCGAGUCGGUGC | |
| | UUUU | |
| gRNA-#8 | ACCUUGUCUAGAGAGAUUAGGUUUUAGAGCUAGAAAUAGCAAGUUAAA | 561 |
| | AUAAGGCUAGUCCGUUAUCAACUUGAAAAAGUGGCACCGAGUCGGUGC | |
| | UUUU | |
| gRNA-#9 | AGAAGCCAUCCUGCCAAGAAGUUUUAGAGCUAGAAAUAGCAAGUUAAA | 562 |
| | AUAAGGCUAGUCCGUUAUCAACUUGAAAAAGUGGCACCGAGUCGGUGC | |
| | UUUU | |
| gRNA-#10 | AGCAGGUUUGCAGUCAGAUUGUUUUAGAGCUAGAAAUAGCAAGUUAAA | 563 |
| | AUAAGGCUAGUCCGUUAUCAACUUGAAAAAGUGGCACCGAGUCGGUGC | |
| | UUUU | |
| gRNA-#11 | AGGGAUAAGCAGCCUAGCUCGUUUUAGAGCUAGAAAUAGCAAGUUAAA | 564 |
| | AUAAGGCUAGUCCGUUAUCAACUUGAAAAAGUGGCACCGAGUCGGUGC | |
| | UUUU | |
| gRNA-#12 | AGGUUUGCAGUCAGAUUGGCGUUUUAGAGCUAGAAAUAGCAAGUUAAA | 565 |
| | AUAAGGCUAGUCCGUUAUCAACUUGAAAAAGUGGCACCGAGUCGGUGC | |
| | UUUU | |
| gRNA-#13 | AGUAUAAAAGCCCCAGGCUGGUUUUAGAGCUAGAAAUAGCAAGUUAAA | 566 |
| | AUAAGGCUAGUCCGUUAUCAACUUGAAAAAGUGGCACCGAGUCGGUGC | |
| | UUUU | |
| gRNA-#14 | AGUCAAUAAUCAGAAUCAGCGUUUUAGAGCUAGAAAUAGCAAGUUAAA | 567 |
| | AUAAGGCUAGUCCGUUAUCAACUUGAAAAAGUGGCACCGAGUCGGUGC | |
| | UUUU | |
| gRNA-#15 | AUAAUCAGAAUCAGCAGGUUGUUUUAGAGCUAGAAAUAGCAAGUUAAA | 568 |
| | AUAAGGCUAGUCCGUUAUCAACUUGAAAAAGUGGCACCGAGUCGGUGC | |
| | UUUU | |
| gRNA-#16 | GUUCUGUCUUUUGGUCAGGACAACCGUCUAGCUAUAAGUGCUGCAGGG | 569 |
| | UGUGAGAAACUCCUAUUGCUGGACGAUGUCUCUUACGAGGCAUUAGCA | |
| | CUUGACUUAGUCAACAAAGAGAG | |
| gRNA-#17 | GUUCUGUCUUUUGGUCAGGACAACCGUCUAGCUAUAAGUGCUGCAGGG | 570 |
| | UGUGAGAAACUCCUAUUGCUGGACGAUGUCUCUUACGAGGCAUUAGCA | |
| | CUCUCUUUGUUGACUAAGUCAAU | |
| gRNA-#18 | GUUCUGUCUUUUGGUCAGGACAACCGUCUAGCUAUAAGUGCUGCAGGG | 571 |
| | UGUGAGAAACUCCUAUUGCUGGACGAUGUCUCUUACGAGGCAUUAGCA | |
| | CUGAUUAUUGACUUAGUCAACAA | |
| gRNA-#19 | GUUCUGUCUUUUGGUCAGGACAACCGUCUAGCUAUAAGUGCUGCAGGG | 485 |
| | UGUGAGAAACUCCUAUUGCUGGACGAUGUCUCUUACGAGGCAUUAGCA | |
| | CUUGGCAGGAUGGCUUCUCAUCG | |
| gRNA-#20 | GUUCUGUCUUUUGGUCAGGACAACCGUCUAGCUAUAAGUGCUGCAGGG | 573 |
| | UGUGAGAAACUCCUAUUGCUGGACGAUGUCUCUUACGAGGCAUUAGCA | |
| | CACUUAGUCAACAAAGAGAGAAU | |
| gRNA-#21 | GUUCUGUCUUUUGGUCAGGACAACCGUCUAGCUAUAAGUGCUGCAGGG | 574 |
| | UGUGAGAAACUCCUAUUGCUGGACGAUGUCUCUUACGAGGCAUUAGCA | |
| | CGCAGGGAUAAGCAGCCUAGCUC | |
| gRNA-#22 | GUUCUGUCUUUUGGUCAGGACAACCGUCUAGCUAUAAGUGCUGCAGGG | 575 |
| | UGUGAGAAACUCCUAUUGCUGGACGAUGUCUCUUACGAGGCAUUAGCA | |
| | CGUAUGGGUUACUUAUUCUCUCU | |
| gRNA-#23 | CAAGAAUGAGUGGACUUCUGGUUUUAGAGCUAGAAAUAGCAAGUUAAA | 576 |
| | AUAAGGCUAGUCCGUUAUCAACUUGAAAAAGUGGCACCGAGUCGGUGC | |
| | UUUU | |
| gRNA-#24 | CAAUCUGACUGCAAACCUGCGUUUUAGAGCUAGAAAUAGCAAGUUAAA | 577 |
| | AUAAGGCUAGUCCGUUAUCAACUUGAAAAAGUGGCACCGAGUCGGUGC | |
| | UUUU | |
| gRNA-#25 | CACAGAAGUCCACUCAUUCUGUUUUAGAGCUAGAAAUAGCAAGUUAAA | 578 |
| | AUAAGGCUAGUCCGUUAUCAACUUGAAAAAGUGGCACCGAGUCGGUGC | |
| | UUUU | |
| gRNA-#26 | CAGACGAUGAGAAGCCAUCCGUUUUAGAGCUAGAAAUAGCAAGUUAAA | 579 |
| | AUAAGGCUAGUCCGUUAUCAACUUGAAAAAGUGGCACCGAGUCGGUGC | |
| | UUUU | |
| gRNA-#27 | CAGCAGGUUUGCAGUCAGAUGUUUUAGAGCUAGAAAUAGCAAGUUAAA | 580 |
| | AUAAGGCUAGUCCGUUAUCAACUUGAAAAAGUGGCACCGAGUCGGUGC | |
| | UUUU | |
| gRNA-#28 | CAGGAUGGCUUCUCAUCGUCGUUUUAGAGCUAGAAAUAGCAAGUUAAA | 581 |
| | AUAAGGCUAGUCCGUUAUCAACUUGAAAAAGUGGCACCGAGUCGGUGC | |
| | UUUU | |
| gRNA-#29 | CAGGUUUGCAGUCAGAUUGGCGUUUUAGUACUCUGUAAUGAAAAUUAC | 582 |
| | AGAAUCUACUAAAACAAGGCAAAAUGCCGUGUUUAUCUCGUCAACUUG | |
| | UUGGCGAGAUUUU | |
| gRNA-#30 | CAGUCAGAUUGGCAGGGAUAGUUUUAGAGCUAGAAAUAGCAAGUUAAA | 583 |
| | AUAAGGCUAGUCCGUUAUCAACUUGAAAAAGUGGCACCGAGUCGGUGC | |
| | UUUU | |
| gRNA-#31 | CCACUCAUUCUUGGCAGGAUGUUUUAGAGCUAGAAAUAGCAAGUUAAA | 584 |
| | AUAAGGCUAGUCCGUUAUCAACUUGAAAAAGUGGCACCGAGUCGGUGC | |
| | UUUU | |
| gRNA-#32 | CUAAGUCAAUAAUCAGAAUCGUUUUAGAGCUAGAAAUAGCAAGUUAAA | 585 |
| | AUAAGGCUAGUCCGUUAUCAACUUGAAAAAGUGGCACCGAGUCGGUGC | |
| | UUUU | |
| gRNA-#33 | GUUCUGUCUUUUGGUCAGGACAACCGUCUAGCUAUAAGUGCUGCAGGG | 586 |
| | UGUGAGAAACUCCUAUUGCUGGACGAUGUCUCUUACGAGGCAUUAGCA | |
| | CGUCAACAAAGAGAGAAUAAGUA | |
| gRNA-#34 | CUUAUCCCUGCCAAUCUGACGUUUUAGAGCUAGAAAUAGCAAGUUAAA | 587 |
| | AUAAGGCUAGUCCGUUAUCAACUUGAAAAAGUGGCACCGAGUCGGUGC | |
| | UUUU | |
| gRNA-#35 | GUUCUGUCUUUUGGUCAGGACAACCGUCUAGCUAUAAGUGCUGCAGGG | 588 |
| | UGUGAGAAACUCCUAUUGCUGGACGAUGUCUCUUACGAGGCAUUAGCA | |
| | CUCCCUGCCAAUCUGACUGCAAA | |
| gRNA-#36 | GUUCUGUCUUUUGGUCAGGACAACCGUCUAGCUAUAAGUGCUGCAGGG | 589 |
| | UGUGAGAAACUCCUAUUGCUGGACGAUGUCUCUUACGAGGCAUUAGCA | |
| | CUUCUCUCUUUGUUGACUAAGUC | |
| gRNA-#37 | GUUCUGUCUUUUGGUCAGGACAACCGUCUAGCUAUAAGUGCUGCAGGG | 590 |
| | UGUGAGAAACUCCUAUUGCUGGACGAUGUCUCUUACGAGGCAUUAGCA | |
| | CUCCUGAGCUAGGCUGCUUAUCC | |
| gRNA-#38 | CUUCUGUGAUGGCUGCUCCCGUUUUAGAGCUAGAAAUAGCAAGUUAAA | 591 |
| | AUAAGGCUAGUCCGUUAUCAACUUGAAAAAGUGGCACCGAGUCGGUGC | |
| | UUUU | |
| gRNA-#39 | GUUCUGUCUUUUGGUCAGGACAACCGUCUAGCUAUAAGUGCUGCAGGG | 592 |
| | UGUGAGAAACUCCUAUUGCUGGACGAUGUCUCUUACGAGGCAUUAGCA | |
| | CUGUGAUGGCUGCUCCCAGCCUG | |
| gRNA-#40 | GUUCUGUCUUUUGGUCAGGACAACCGUCUAGCUAUAAGUGCUGCAGGG | 593 |
| | UGUGAGAAACUCCUAUUGCUGGACGAUGUCUCUUACGAGGCAUUAGCA | |
| | CGCAGGAUGGCUUCUCAUCGUCU | |
| gRNA-#41 | GUUCUGUCUUUUGGUCAGGACAACCGUCUAGCUAUAAGUGCUGCAGGG | 594 |
| | UGUGAGAAACUCCUAUUGCUGGACGAUGUCUCUUACGAGGCAUUAGCA | |
| | CUCUAGAGAGAUUAGAGCAUCGG | |
| gRNA-#42 | GUUCUGUCUUUUGGUCAGGACAACCGUCUAGCUAUAAGUGCUGCAGGG | 595 |
| | UGUGAGAAACUCCUAUUGCUGGACGAUGUCUCUUACGAGGCAUUAGCA | |
| | CGUUGACUAAGUCAAUAAUCAGA | |
| gRNA-#43 | GUUCUGUCUUUUGGUCAGGACAACCGUCUAGCUAUAAGUGCUGCAGGG | 596 |
| | UGUGAGAAACUCCUAUUGCUGGACGAUGUCUCUUACGAGGCAUUAGCA | |
| | CUAUACUCACUUCUCCUGAGCUA | |
| gRNA-#44 | GAAGUGAGUAUAAAAGCCCCGUUUUAGAGCUAGAAAUAGCAAGUUAAA | 597 |
| | AUAAGGCUAGUCCGUUAUCAACUUGAAAAAGUGGCACCGAGUCGGUGC | |
| | UUUU | |
| gRNA-#45 | GACAAGGUUCAUAUUUGUAUGUUUUAGAGCUAGAAAUAGCAAGUUAAA | 598 |
| | AUAAGGCUAGUCCGUUAUCAACUUGAAAAAGUGGCACCGAGUCGGUGC | |
| | UUUU | |
| gRNA-#46 | GAGUAUAAAAGCCCCAGGCUGUUUUAGAGCUAGAAAUAGCAAGUUAAA | 599 |
| | AUAAGGCUAGUCCGUUAUCAACUUGAAAAAGUGGCACCGAGUCGGUGC | |
| | UUUU | |
| gRNA-#47 | GAGUGGACUUCUGUGAUGGCGUUUUAGAGCUAGAAAUAGCAAGUUAAA | 600 |
| | AUAAGGCUAGUCCGUUAUCAACUUGAAAAAGUGGCACCGAGUCGGUGC | |
| | UUUU | |
| gRNA-#48 | GAUGGCUGCUCCCAGCCUGGGUUUUAGAGCUAGAAAUAGCAAGUUAAA | 601 |
| | AUAAGGCUAGUCCGUUAUCAACUUGAAAAAGUGGCACCGAGUCGGUGC | |
| | UUUU | |
| gRNA-#49 | GCAGCCUAGCUCAGGAGAAGGUUUUAGAGCUAGAAAUAGCAAGUUAAA | 602 |
| | AUAAGGCUAGUCCGUUAUCAACUUGAAAAAGUGGCACCGAGUCGGUGC | |
| | UUUU | |
| gRNA-#50 | GCUGCUUAUCCCUGCCAAUCGUUUUAGAGCUAGAAAUAGCAAGUUAAA | 603 |
| | AUAAGGCUAGUCCGUUAUCAACUUGAAAAAGUGGCACCGAGUCGGUGC | |
| | UUUU | |
| gRNA-#51 | GGGAUAAGCAGCCUAGCUCAGUUUUAGAGCUAGAAAUAGCAAGUUAAA | 604 |
| | AUAAGGCUAGUCCGUUAUCAACUUGAAAAAGUGGCACCGAGUCGGUGC | |
| | UUUU | |
| gRNA-#52 | GGUUUGCAGUCAGAUUGGCAGUUUUAGAGCUAGAAAUAGCAAGUUAAA | 605 |
| | AUAAGGCUAGUCCGUUAUCAACUUGAAAAAGUGGCACCGAGUCGGUGC | |
| | UUUU | |
| gRNA-#53 | GUUACUUAUUCUCUCUUUGUGUUUUAGAGCUAGAAAUAGCAAGUUAAA | 606 |
| | AUAAGGCUAGUCCGUUAUCAACUUGAAAAAGUGGCACCGAGUCGGUGC | |
| | UUUU | |
| gRNA-#54 | GUUCUGUCUUUUGGUCAGGACAACCGUCUAGCUAUAAGUGCUGCAGGG | 607 |
| | UGUGAGAAACUCCUAUUGCUGGACGAUGUCUCUUACGAGGCAUUAGCA | |
| | CCUUAUUCUCUCUUUGUUGACUA | |
| gRNA-#55 | GUUCUGUCUUUUGGUCAGGACAACCGUCUAGCUAUAAGUGCUGCAGGG | 608 |
| | UGUGAGAAACUCCUAUUGCUGGACGAUGUCUCUUACGAGGCAUUAGCA | |
| | CAUAUUUGUAUGGGUUACUUAUU | |
| gRNA-#56 | GUUCUGUCUUUUGGUCAGGACAACCGUCUAGCUAUAAGUGCUGCAGGG | 609 |
| | UGUGAGAAACUCCUAUUGCUGGACGAUGUCUCUUACGAGGCAUUAGCA | |
| | CACUAAGUCAAUAAUCAGAAUCA | |
| gRNA-#57 | GUUUGCAGUCAGAUUGGCAGGUUUUAGAGCUAGAAAUAGCAAGUUAAA | 610 |
| | AUAAGGCUAGUCCGUUAUCAACUUGAAAAAGUGGCACCGAGUCGGUGC | |
| | UUUU | |
| gRNA-#58 | GUUCUGUCUUUUGGUCAGGACAACCGUCUAGCUAUAAGUGCUGCAGGG | 611 |
| | UGUGAGAAACUCCUAUUGCUGGACGAUGUCUCUUACGAGGCAUUAGCA | |
| | CGCAGUCAGAUUGGCAGGGAUAA | |
| gRNA-#59 | UACAAAUAUGAACCUUGUCUGUUUUAGAGCUAGAAAUAGCAAGUUAAA | 612 |
| | AUAAGGCUAGUCCGUUAUCAACUUGAAAAAGUGGCACCGAGUCGGUGC | |
| | UUUU | |
| gRNA-#60 | UACUCACUUCUCCUGAGCUAGUUUUAGAGCUAGAAAUAGCAAGUUAAA | 613 |
| | AUAAGGCUAGUCCGUUAUCAACUUGAAAAAGUGGCACCGAGUCGGUGC | |
| | UUUU | |
| gRNA-#61 | UAUAAAAGCCCCAGGCUGGGGUUUUAGAGCUAGAAAUAGCAAGUUAAA | 614 |
| | AUAAGGCUAGUCCGUUAUCAACUUGAAAAAGUGGCACCGAGUCGGUGC | |
| | UUUU | |
| gRNA-#62 | UCACUUCUCCUGAGCUAGGCGUUUUAGAGCUAGAAAUAGCAAGUUAAA | 615 |
| | AUAAGGCUAGUCCGUUAUCAACUUGAAAAAGUGGCACCGAGUCGGUGC | |
| | UUUU | |
| gRNA-#63 | UCAGAUUGGCAGGGAUAAGCGUUUUAGAGCUAGAAAUAGCAAGUUAAA | 616 |
| | AUAAGGCUAGUCCGUUAUCAACUUGAAAAAGUGGCACCGAGUCGGUGC | |
| | UUUU | |
| gRNA-#64 | UCAGGAGAAGUGAGUAUAAAGUUUUAGAGCUAGAAAUAGCAAGUUAAA | 617 |
| | AUAAGGCUAGUCCGUUAUCAACUUGAAAAAGUGGCACCGAGUCGGUGC | |
| | UUUU | |
| gRNA-#65 | UCUGACUGCAAACCUGCUGAUGUUUUAGUACUCUGUAAUGAAAAUUAC | 618 |
| | AGAAUCUACUAAAACAAGGCAAAAUGCCGUGUUUAUCUCGUCAACUUG | |
| | UUGGCGAGAUUUU | |
| gRNA-#66 | UGAGCUAGGCUGCUUAUCCCGUUUUAGAGCUAGAAAUAGCAAGUUAAA | 619 |
| | AUAAGGCUAGUCCGUUAUCAACUUGAAAAAGUGGCACCGAGUCGGUGC | |
| | UUUU | |
| gRNA-#67 | UGCCAAUCUGACUGCAAACCGUUUUAGAGCUAGAAAUAGCAAGUUAAA | 620 |
| | AUAAGGCUAGUCCGUUAUCAACUUGAAAAAGUGGCACCGAGUCGGUGC | |
| | UUUU | |
| gRNA-#68 | UGCUCUAAUCUCUCUAGACAGUUUUAGAGCUAGAAAUAGCAAGUUAAA | 621 |
| | AUAAGGCUAGUCCGUUAUCAACUUGAAAAAGUGGCACCGAGUCGGUGC | |
| | UUUU | |
| gRNA-#69 | UGUGAUGGCUGCUCCCAGCCGUUUUAGAGCUAGAAAUAGCAAGUUAAA | 622 |
| | AUAAGGCUAGUCCGUUAUCAACUUGAAAAAGUGGCACCGAGUCGGUGC | |
| | UUUU | |
| gRNA-#70 | UUGGCAGGGAUAAGCAGCCUGUUUUAGAGCUAGAAAUAGCAAGUUAAA | 623 |
| | AUAAGGCUAGUCCGUUAUCAACUUGAAAAAGUGGCACCGAGUCGGUGC | |
| | UUUU | |
| gRNA-#71 | UUUUAUACUCACUUCUCCUGGUUUUAGAGCUAGAAAUAGCAAGUUAAA | 624 |
| | AUAAGGCUAGUCCGUUAUCAACUUGAAAAAGUGGCACCGAGUCGGUGC | |
| | UUUU | |
| gRNA_361 | UAUAGGAAAACCAGUGAGUC | 475 |
| gRNA_362 | UACUCACCUCUGCAUGCUCA | 476 |
| gRNA_363 | ACUCACCUCUGCAUGCUCAU | 625 |
| gRNA_364 | UACCACCUAUGAGAGAAGAC | 626 |
| gRNA_365 | AUACUCACCUCUGCAUGCUCA | 627 |
| gRNA_366 | ACUGGUUUUCCUAUAAGGUGU | 628 |
| gRNA_367 | UUGGCAGGAUGGCUUCUCAUCG | 629 |
| gRNA_368 | UCCUAUAAGGUGUGAAAGUCUG | 630 |
| gRNA_369 | UGAGCCCAUGCAGCUCUCCAGA | 631 |
| gRNA_370 | CUCCUCAGUUGUGAGCCCAUGC | 632 |
| gRNA_371 | GUAGAAGGGAUAUACAAAGUGG | 633 |
| gRNA_372 | CCACUUUGUAUAUCCCUUCUAC | 634 |
| gRNA_373 | GGUGUCUAUUUCCACUUUGUAU | 635 |
| gRNA_374 | CAUGAGCAUGCAGAGGUGAGUA | 636 |
| gRNA_375 | GGCUAUCGUCACCAAUCCCA | 637 |
| gRNA_376 | GCUAUCGUCACCAAUCCCAA | 638 |
| gRNA_377 | GGCUAUCGUCACCAAUCCCA | 637 |
| gRNA_361 | UAUAGGAAAACCAGUGAGUC | 475 |
| gRNA_362 | UACUCACCUCUGCAUGCUCA | 476 |
| gRNA_363 | ACUCACCUCUGCAUGCUCAU | 625 |
| gRNA_364 | UACCACCUAUGAGAGAAGAC | 626 |
| gRNA_365 | AUACUCACCUCUGCAUGCUCA | 627 |
| gRNA_366 | ACUGGUUUUCCUAUAAGGUGU | 628 |
| gRNA_367 | UUGGCAGGAUGGCUUCUCAUCG | 629 |
| gRNA_368 | UCCUAUAAGGUGUGAAAGUCUG | 630 |
| gRNA_369 | UGAGCCCAUGCAGCUCUCCAGA | 631 |
| gRNA_370 | CUCCUCAGUUGUGAGCCCAUGC | 632 |
| gRNA_371 | GUAGAAGGGAUAUACAAAGUGG | 633 |
| gRNA_372 | CCACUUUGUAUAUCCCUUCUAC | 634 |
| gRNA_373 | GGUGUCUAUUUCCACUUUGUAU | 635 |
| gRNA_374 | CAUGAGCAUGCAGAGGUGAGUA | 636 |
| gRNA_375 | GGCUAUCGUCACCAAUCCCA | 637 |
| gRNA_376 | GCUAUCGUCACCAAUCCCAA | 638 |
| gRNA_377 | GGCUAUCGUCACCAAUCCCA | 637 |
| gRNA1747 | AAGAGAGAAUAAGUAACCCAU | 472 |
| gRNA1748 | AAGCAGCCUAGCUCAGGAGAA | 654 |
| gRNA1749 | AAGUCCACUCAUUCUUGGCA | 655 |
| gRNA1750 | ACGAUGAGAAGCCAUCCUGCC | 656 |
| gRNA1751 | AGACAAGGUUCAUAUUUGUA | 657 |
| gRNA1752 | AGGCUGGGAGCAGCCAUCAC | 658 |
| gRNA1753 | AUAAGUAACCCAUACAAAUA | 659 |
| gRNA1754 | AUACUCACUUCUCCUGAGCU | 660 |
| gRNA1755 | AUUAUUGACUUAGUCAACAA | 661 |
| gRNA1756 | CAAAUAUGAACCUUGUCUAG | 662 |
| gRNA1757 | CAGAAGUCCACUCAUUCUUGG | 663 |
| gRNA1758 | CAGGCUGGGAGCAGCCAUCAC | 664 |
| gRNA1759 | CCAUCCUGCCAAGAAUGAGU | 665 |
| gRNA1760 | CCUGCUGAUUCUGAUUAUUGA | 666 |
| gRNA1761 | CGAUGCUCUAAUCUCUCUAGA | 667 |
| gRNA1762 | CUAAGUCAAUAAUCAGAAUCA | 668 |
| gRNA1763 | CUAGACAAGGUUCAUAUUUGU | 669 |
| gRNA1764 | GAACCUUGUCUAGAGAGAUU | 670 |
| gRNA1765 | GAAGUCCACUCAUUCUUGGC | 671 |
| gRNA1766 | GAAUCAGCAGGUUUGCAGUC | 672 |
| gRNA1767 | GAAUGAGUGGACUUCUGUGA | 673 |
| gRNA1768 | GACUGCAAACCUGCUGAUUC | 674 |
| gRNA1769 | GACUUAGUCAACAAAGAGAGA | 675 |
| gRNA1770 | GAUAAGCAGCCUAGCUCAGG | 676 |
| gRNA1771 | GAUGAGAAGCCAUCCUGCCA | 677 |
| gRNA1773 | GCUUUUAUACUCACUUCUCC | 654 |
| gRNA1774 | GGAUAAGCAGCCUAGCUCAGG | 655 |
| gRNA1775 | GUCUAGAGAGAUUAGAGCAU | 656 |
| gRNA1776 | GUGAUGGCUGCUCCCAGCCU | 657 |
| gRNA1777 | UACUUAUUCUCUCUUUGUUGA | 658 |
| gRNA1778 | UAUUCUCUCUUUGUUGACUAA | 659 |
| gRNA1779 | UAUUGACUUAGUCAACAAAG | 660 |
| gRNA1780 | UAUUGACUUAGUCAACAAAGA | 661 |
| gRNA1781 | UCAGAAUCAGCAGGUUUGCAG | 662 |
| gRNA1782 | UCCACUCAUUCUUGGCAGGA | 663 |
| gRNA1783 | UCUCUCUUUGUUGACUAAGUC | 664 |
| gRNA1784 | UGAGAAGCCAUCCUGCCAAGA | 665 |
| gRNA1785 | UGAGCUAGGCUGCUUAUCCCU | 666 |
| gRNA1786 | UGAGUAUAAAAGCCCCAGGC | 667 |
| gRNA1787 | UGAUGGCUGCUCCCAGCCUG | 668 |
| gRNA1788 | UGCCAAGAAUGAGUGGACUUC | 669 |
| gRNA1789 | UGCCAAUCUGACUGCAAACCU | 670 |
| gRNA1790 | UGUUGACUAAGUCAAUAAUC | 671 |
| gRNA1791 | UUGACUUAGUCAACAAAGAG | 672 |
| gRNA1792 | UUUGUUGACUAAGUCAAUAAU | 673 |
| gRNA1746 | AACCUGCUGAUUCUGAUUAU | 674 |
| gRNA1594 | CAACUUACCCAGAGGCAAAU | 675 |
| gRNA1595 | AAUGGCUCCCAGGUGUCAUC | 676 |
| gRNA1596 | GGCUCCCAGGUGUCAUCAGC | 677 |
| gRNA1597 | CUCUCAUAGGUGGUAUUCAC | 653 |
| gRNA1598 | UAUAGGAAAACCAGUGAGUC | 475 |
| gRNA1599 | UACUCACCUCUGCAUGCUCA | 476 |
| gRNA1600 | GCAACUUACCCAGAGGCAAA | 474 |
| gRNA1601 | UCUGUAUACUCACCUCUGCA | 707 |
| gRNA1602 | GAAACACUCACCGUAGGGCC | 708 |
| gRNA1603 | CUCUACACCCAGGGCACCGG | 709 |
| gRNA1604 | ACACCUUAUAGGAAAACCAG | 710 |
| gRNA1605 | AUAGGAAAACCAGUGAGUCU | 711 |
| gRNA1606 | ACUCACCUCUGCAUGCUCAU | 625 |
| gRNA1607 | CUCACCGUAGGGCCAGCCUC | 713 |
| gRNA-#1 | AAAAGCCCCAGGCUGGGAGC | 714 |
| gRNA-#2 | AAGUGAGUAUAAAAGCCCCA | 715 |
| gRNA-#3 | AAUAAUCAGAAUCAGCAGGUU | 716 |
| gRNA-#4 | AAUAUGAACCUUGUCUAGAG | 717 |
| gRNA-#5 | AAUGAGUGGACUUCUGUGAU | 718 |
| gRNA-#6 | ACAAAUAUGAACCUUGUCUAG | 719 |
| gRNA-#7 | ACAGAAGUCCACUCAUUCUU | 720 |
| gRNA-#8 | ACCUUGUCUAGAGAGAUUAG | 721 |
| gRNA-#9 | AGAAGCCAUCCUGCCAAGAA | 722 |
| gRNA-#10 | AGCAGGUUUGCAGUCAGAUU | 723 |
| gRNA-#11 | AGGGAUAAGCAGCCUAGCUC | 724 |
| gRNA-#12 | AGGUUUGCAGUCAGAUUGGC | 725 |
| gRNA-#13 | AGUAUAAAAGCCCCAGGCUG | 726 |
| gRNA-#14 | AGUCAAUAAUCAGAAUCAGC | 727 |
| gRNA-#15 | AUAAUCAGAAUCAGCAGGUU | 728 |
| gRNA-#16 | UUGACUUAGUCAACAAAGAGAG | 729 |
| gRNA-#17 | UCUCUUUGUUGACUAAGUCAAU | 730 |
| gRNA-#18 | UGAUUAUUGACUUAGUCAACAA | 731 |
| gRNA-#19 | UUGGCAGGAUGGCUUCUCAUCG | 629 |
| (gRNA_367) | | |
| gRNA-#20 | ACUUAGUCAACAAAGAGAGAAU | 733 |
| gRNA-#21 | GCAGGGAUAAGCAGCCUAGCUC | 734 |
| gRNA-#22 | GUAUGGGUUACUUAUUCUCUCU | 735 |
| gRNA-#23 | CAAGAAUGAGUGGACUUCUG | 736 |
| gRNA-#24 | CAAUCUGACUGCAAACCUGC | 737 |
| gRNA-#25 | CACAGAAGUCCACUCAUUCU | 738 |
| gRNA-#26 | CAGACGAUGAGAAGCCAUCC | 739 |
| gRNA-#27 | CAGCAGGUUUGCAGUCAGAU | 740 |
| gRNA-#28 | CAGGAUGGCUUCUCAUCGUC | 741 |
| gRNA-#29 | CAGGUUUGCAGUCAGAUUGGC | 742 |
| gRNA-#30 | CAGUCAGAUUGGCAGGGAUA | 743 |
| gRNA-#31 | CCACUCAUUCUUGGCAGGAU | 744 |
| gRNA-#32 | CUAAGUCAAUAAUCAGAAUC | 745 |
| gRNA-#33 | GUCAACAAAGAGAGAAUAAGUA | 746 |
| gRNA-#34 | CUUAUCCCUGCCAAUCUGAC | 747 |
| gRNA-#35 | UCCCUGCCAAUCUGACUGCAAA | 748 |
| gRNA-#36 | UUCUCUCUUUGUUGACUAAGUC | 749 |
| gRNA-#37 | UCCUGAGCUAGGCUGCUUAUCC | 750 |
| gRNA-#38 | CUUCUGUGAUGGCUGCUCCC | 751 |
| gRNA-#39 | UGUGAUGGCUGCUCCCAGCCUG | 752 |
| gRNA-#40 | GCAGGAUGGCUUCUCAUCGUCU | 753 |
| gRNA-#41 | UCUAGAGAGAUUAGAGCAUCGG | 754 |
| gRNA-#42 | GUUGACUAAGUCAAUAAUCAGA | 755 |
| gRNA-#43 | UAUACUCACUUCUCCUGAGCUA | 756 |
| gRNA-#44 | GAAGUGAGUAUAAAAGCCCC | 757 |
| gRNA-#45 | GACAAGGUUCAUAUUUGUAU | 758 |
| gRNA-#46 | GAGUAUAAAAGCCCCAGGCU | 759 |
| gRNA-#47 | GAGUGGACUUCUGUGAUGGC | 760 |
| gRNA-#48 | GAUGGCUGCUCCCAGCCUGG | 761 |
| gRNA-#49 | GCAGCCUAGCUCAGGAGAAG | 762 |
| gRNA-#50 | GCUGCUUAUCCCUGCCAAUC | 763 |
| gRNA-#51 | GGGAUAAGCAGCCUAGCUCA | 764 |
| gRNA-#52 | GGUUUGCAGUCAGAUUGGCA | 765 |
| gRNA-#53 | GUUACUUAUUCUCUCUUUGU | 766 |
| gRNA-#54 | CUUAUUCUCUCUUUGUUGACUA | 767 |
| gRNA-#55 | AUAUUUGUAUGGGUUACUUAUU | 768 |
| gRNA-#56 | ACUAAGUCAAUAAUCAGAAUCA | 769 |
| gRNA-#57 | GUUUGCAGUCAGAUUGGCAG | 770 |
| gRNA-#58 | GCAGUCAGAUUGGCAGGGAUAA | 771 |
| gRNA-#59 | UACAAAUAUGAACCUUGUCU | 772 |
| gRNA-#60 | UACUCACUUCUCCUGAGCUA | 773 |
| gRNA-#61 | UAUAAAAGCCCCAGGCUGGG | 774 |
| gRNA-#62 | UCACUUCUCCUGAGCUAGGC | 775 |
| gRNA-#63 | UCAGAUUGGCAGGGAUAAGC | 776 |
| gRNA-#64 | UCAGGAGAAGUGAGUAUAAA | 777 |
| gRNA-#65 | UCUGACUGCAAACCUGCUGAU | 778 |
| gRNA-#66 | UGAGCUAGGCUGCUUAUCCC | 779 |
| gRNA-#67 | UGCCAAUCUGACUGCAAACC | 780 |
| gRNA-#68 | UGCUCUAAUCUCUCUAGACA | 781 |
| gRNA-#69 | UGUGAUGGCUGCUCCCAGCC | 782 |
| gRNA-#70 | UUGGCAGGGAUAAGCAGCCU | 783 |
| gRNA-#71 | UUUUAUACUCACUUCUCCUG | 784 |
| gRNA-#54 | CUUAUUCUCUCUUUGUUGACUA | 767 |
| gRNA-#55 | AUAUUUGUAUGGGUUACUUAUU | 768 |
| gRNA-#56 | ACUAAGUCAAUAAUCAGAAUCA | 769 |
| gRNA-#57 | GUUUGCAGUCAGAUUGGCAG | 770 |
| gRNA-#58 | GCAGUCAGAUUGGCAGGGAUAA | 771 |
| gRNA-#59 | UACAAAUAUGAACCUUGUCU | 772 |
| gRNA-#60 | UACUCACUUCUCCUGAGCUA | 773 |
| gRNA-#61 | UAUAAAAGCCCCAGGCUGGG | 774 |
| gRNA-#62 | UCACUUCUCCUGAGCUAGGC | 775 |
| gRNA-#63 | UCAGAUUGGCAGGGAUAAGC | 776 |
| gRNA-#64 | UCAGGAGAAGUGAGUAUAAA | 777 |
| gRNA-#65 | UCUGACUGCAAACCUGCUGAU | 778 |
| gRNA-#66 | UGAGCUAGGCUGCUUAUCCC | 779 |
| gRNA-#67 | UGCCAAUCUGACUGCAAACC | 780 |
| gRNA-#68 | UGCUCUAAUCUCUCUAGACA | 781 |
| gRNA-#69 | UGUGAUGGCUGCUCCCAGCC | 782 |
| gRNA-#70 | UUGGCAGGGAUAAGCAGCCU | 783 |
| gRNA-#71 | UUUUAUACUCACUUCUCCUG | 784 |
| gRNA-#54 | CUUAUUCUCUCUUUGUUGACUA | 767 |
| gRNA-#55 | AUAUUUGUAUGGGUUACUUAUU | 768 |
| gRNA-#56 | ACUAAGUCAAUAAUCAGAAUCA | 769 |
| gRNA-#57 | GUUUGCAGUCAGAUUGGCAG | 770 |
| gRNA-#58 | GCAGUCAGAUUGGCAGGGAUAA | 771 |
| gRNA-#59 | UACAAAUAUGAACCUUGUCU | 772 |
| gRNA-#60 | UACUCACUUCUCCUGAGCUA | 773 |
| gRNA-#61 | UAUAAAAGCCCCAGGCUGGG | 774 |
| gRNA-#62 | UCACUUCUCCUGAGCUAGGC | 775 |
| gRNA-#63 | UCAGAUUGGCAGGGAUAAGC | 776 |
| gRNA-#64 | UCAGGAGAAGUGAGUAUAAA | 777 |
| gRNA-#65 | UCUGACUGCAAACCUGCUGAU | 778 |
| gRNA-#66 | UGAGCUAGGCUGCUUAUCCC | 779 |
| gRNA-#67 | UGCCAAUCUGACUGCAAACC | 780 |
| gRNA-#68 | UGCUCUAAUCUCUCUAGACA | 781 |
| gRNA-#69 | UGUGAUGGCUGCUCCCAGCC | 782 |
| gRNA-#70 | UUGGCAGGGAUAAGCAGCCU | 783 |
| gRNA-#71 | UUUUAUACUCACUUCUCCUG | 784 |
| | GCCAUCCUGCCAAGAACGAG | 473 |
| | GCAACUUACCCAGAGGCAAA | 474 |
| | UAUAGGAAAACCAGUGAGUC | 475 |
| | UACUCACCUCUGCAUGCUCA | 476 |
| | GCCAUCCUGCCAAGAACGAG | 473 |
| | GCCAUCCUGCCAAGAACGAG | 473 |
| | GCAACUUACCCAGAGGCAAA | 474 |
| | UAUAGGAAAACCAGUGAGUC | 475 |
| | UACUCACCUCUGCAUGCUCA | 476 |
| | GCCAUCCUGCCAAGAACGAG | 473 |
| | AUCCUGCCAAGAACGAGGUUUUAGAGCUAGAAAUAGCAAGUUAAAAUA | 1214 |
| | AGGCUAGUCCGUUAUCAACUUGAAAAAGUGGCACCGAGUCGGUGCUUU | |
| | U | |
| | GCAACUUACCCAGAGGCAAAGUUUUAGAGCUAGAAAUAGCAAGUUAAA | 499 |
| | AUAAGGCUAGUCCGUUAUCAACUUGAAAAAGUGGCACCGAGUCGGUGC | |
| | UUUU | |
| | UAUAGGAAAACCAGUGAGUCGUUUUAGAGCUAGAAAUAGCAAGUUAAA | 497 |
| | AUAAGGCUAGUCCGUUAUCAACUUGAAAAAGUGGCACCGAGUCGGUGC | |
| | UUUU | |
| | UACUCACCUCUGCAUGCUCAGUUUUAGAGCUAGAAAUAGCAAGUUAAA | 480 |
| | AUAAGGCUAGUCCGUUAUCAACUUGAAAAAGUGGCACCGAGUCGGUGC | |
| | UUUU | |
| | GCCAUCCUGCCAAGAACGAGGUUUUAGAGCUAGAAAUAGCAAGUUAAA | 1044 |
| | AUAAGGCUAGUCCGUUAUCAACUUGAAAAAGUGGCACCGAGUCGGUGC | |
| | UUUU | |
| | UAUAGGAAAACCAGUGAGUCGUUUUAGAGCUAGAAAUAGCAAGUUAAA | 497 |
| | AUAAGGCUAGUCCGUUAUCAACUUGAAAAAGUGGCACCGAGUCGGUGC | |
| | UUUU | |
| | GCCAUCCUGCCAAGAACGAGGUUUUAGAGCUAGAAAUAGCAAGUUAAA | 1044 |
| | AUAAGGCUAGUCCGUUAUCAACUUGAAAAAGUGGCACCGAGUCGGUGC | |
| | UUUU | |
| | GCAACUUACCCAGAGGCAAAGUUUUAGAGCUAGAAAUAGCAAGUUAAA | 499 |
| | AUAAGGCUAGUCCGUUAUCAACUUGAAAAAGUGGCACCGAGUCGGUGC | |
| | UUUU | |
| | UAUAGGAAAACCAGUGAGUCGUUUUAGAGCUAGAAAUAGCAAGUUAAA | 497 |
| | AUAAGGCUAGUCCGUUAUCAACUUGAAAAAGUGGCACCGAGUCGGUGC | |
| | UUUU | |
| | UACUCACCUCUGCAUGCUCAGUUUUAGAGCUAGAAAUAGCAAGUUAAA | 480 |
| | AUAAGGCUAGUCCGUUAUCAACUUGAAAAAGUGGCACCGAGUCGGUGC | |
| | UUUU | |
| | GCCAUCCUGCCAAGAACGAGGUUUUAGAGCUAGAAAUAGCAAGUUAAA | 1044 |
| | AUAAGGCUAGUCCGUUAUCAACUUGAAAAAGUGGCACCGAGUCGGUGC | |
| | UUUU | |
| | GCCAUCCUGCCAAGAACGAGGUUUUAGAGCUAGAAAUAGCAAGUUAAA | 1044 |
| | AUAAGGCUAGUCCGUUAUCAACUUGAAAAAGUGGCACCGAGUCGGUGC | |
| | UUUU | |
| | GCAACUUACCCAGAGGCAAAGUUUUAGAGCUAGAAAUAGCAAGUUAAA | 499 |
| | AUAAGGCUAGUCCGUUAUCAACUUGAAAAAGUGGCACCGAGUCGGUGC | |
| | UUUU | |
| | UAUAGGAAAACCAGUGAGUCGUUUUAGAGCUAGAAAUAGCAAGUUAAA | 497 |
| | AUAAGGCUAGUCCGUUAUCAACUUGAAAAAGUGGCACCGAGUCGGUGC | |
| | UUUU | |
| | UACUCACCUCUGCAUGCUCAGUUUUAGAGCUAGAAAUAGCAAGUUAAA | 480 |
| | AUAAGGCUAGUCCGUUAUCAACUUGAAAAAGUGGCACCGAGUCGGUGC | |
| | UUUU | |
| | GCCAUCCUGCCAAGAACGAGGUUUUAGAGCUAGAAAUAGCAAGUUAAA | 1044 |
| | AUAAGGCUAGUCCGUUAUCAACUUGAAAAAGUGGCACCGAGUCGGUGC | |
| | UUUU | |
| GA519 | GCCAUCCUGCCAAGAACGAGGUUUUAGAGCUAGAAAUAGCAAGUUAAA | 1044 |
| | AUAAGGCUAGUCCGUUAUCAACUUGAAAAAGUGGCACCGAGUCGGUGC | |
| | UUUU | |
| GA458 | GCCAUCCUGCCAAGAACGAGGUUUUAGAGCUAGAAAUAGCAAGUUAAA | 1044 |
| | AUAAGGCUAGUCCGUUAUCAACUUGAAAAAGUGGCACCGAGUCGGUGC | |
| | UUUU | |
| GA459 | GCAACUUACCCAGAGGCAAAGUUUUAGAGCUAGAAAUAGCAAGUUAAA | 499 |
| | AUAAGGCUAGUCCGUUAUCAACUUGAAAAAGUGGCACCGAGUCGGUGC | |
| | UUUU | |
| GA460 | UAUAGGAAAACCAGUGAGUCGUUUUAGAGCUAGAAAUAGCAAGUUAAA | 497 |
| | AUAAGGCUAGUCCGUUAUCAACUUGAAAAAGUGGCACCGAGUCGGUGC | |
| | UUUU | |
| GA520 | UAUAGGAAAACCAGUGAGUCGUUUUAGAGCUAGAAAUAGCAAGUUAAA | 497 |
| | AUAAGGCUAGUCCGUUAUCAACUUGAAAAAGUGGCACCGAGUCGGUGC | |
| | UUUU | |
| GA461 | UACUCACCUCUGCAUGCUCAGUUUUAGAGCUAGAAAUAGCAAGUUAAA | 480 |
| | AUAAGGCUAGUCCGUUAUCAACUUGAAAAAGUGGCACCGAGUCGGUGC | |
| | UUUU | |
| GA457 | GCCAUCCUGCCAAGAACGAGGUUUUAGAGCUAGAAAUAGCAAGUUAAA | 1044 |
| | AUAAGGCUAGUCCGUUAUCAACUUGAAAAAGUGGCACCGAGUCGGUGC | |
| | UUUU | |
| GA519 | GCCAUCCUGCCAAGAACGAGGUUUUAGAGCUAGAAAUAGCAAGUUAAA | 1044 |
| | AUAAGGCUAGUCCGUUAUCAACUUGAAAAAGUGGCACCGAGUCGGUGC | |
| | UUUU | |
| GA458 | GCAACUUACCCAGAGGCAAAGUUUUAGAGCUAGAAAUAGCAAGUUAAA | 499 |
| | AUAAGGCUAGUCCGUUAUCAACUUGAAAAAGUGGCACCGAGUCGGUGC | |
| | UUUU | |
| GA459 | UAUAGGAAAACCAGUGAGUCGUUUUAGAGCUAGAAAUAGCAAGUUAAA | 497 |
| | AUAAGGCUAGUCCGUUAUCAACUUGAAAAAGUGGCACCGAGUCGGUGC | |
| | UUUU | |
| GA460 | UAUAGGAAAACCAGUGAGUCGUUUUAGAGCUAGAAAUAGCAAGUUAAA | 497 |
| | AUAAGGCUAGUCCGUUAUCAACUUGAAAAAGUGGCACCGAGUCGGUGC | |
| | UUUU | |
| GA520 | UACUCACCUCUGCAUGCUCAGUUUUAGAGCUAGAAAUAGCAAGUUAAA | 480 |
| | AUAAGGCUAGUCCGUUAUCAACUUGAAAAAGUGGCACCGAGUCGGUGC | |
| | UUUU | |
| GA461 | GCCATCCTGCCAAGAATGAGGUUUUAGAGCUAGAAAUAGCAAGUUAAA | 1045 |
| | AUAAGGCUAGUCCGUUAUCAACUUGAAAAAGUGGCACCGAGUCGGUGC | |
| | UUUU | |
| GA457 | GCCAUCCUGCCAAGAACGAGGUUUUAGAGCUAGAAAUAGCAAGUUAAA | 1215 |
| | AUAAGGCUAGUCCGUUAUCAACUUGAAAAAGUGGCACCGAGUCGGUGC | |
| | UU | |
| GA460 | UAUAGGAAAACCAGUGAGUCGUUUUAGAGCUAGAAAUAGCAAGUUAAA | 497 |
| | AUAAGGCUAGUCCGUUAUCAACUUGAAAAAGUGGCACCGAGUCGGUGC | |
| | UUUU | |
| gRNA_375 | GGCUAUCGUCACCAAUCCCA | 637 |
| gRNA_376 | GCUAUCGUCACCAAUCCCAA | 638 |
| gRNA_377 | GGCUAUCGUCACCAAUCCCA | 637 |

, a sequence provided in the sequence listing submitted herewith, wherein the guide polynucleotide does not comprise the sequence GCCAUCCUGCCAAGAAUGAG (SEQ ID NO: 467), wherein the lipid nanoparticle comprises an amino lipid according to any one of the following Formulas:
A) an amino lipid of Formula (Ia): [chemical structure]
wherein:
R¹ is C₉-C₂₀ alkyl or C₉-C₂₀ alkenyl with 1-3 units of unsaturation;
X¹ and X² are each independently absent or selected from —O—, —NR²— and [chemical structure]
wherein each R² is independently hydrogen or C₁-C₆ alkyl;
each a is independently an integer between 1 and 6;
X³ and X⁴ are each independently absent or selected from the group consisting of: 4- to 8-membered heterocyclyl optionally substituted with 1 or 2 C₁-C₆ alkyl groups, 5- to 6-membered heteroaryl optionally substituted with 1 or 2 C₁-C₆ alkyl groups, 5- to 6-membered aryl optionally substituted with 1 or 2 C₁-C₆ alkyl groups, 4- to 7-membered cycloalkyl optionally substituted with 1 or 2 C₁-C₆ alkyl groups, —O— and —NR³—, wherein each R³ is a independently a hydrogen atom or C₁-C₆ alkyl and wherein X¹-X²-X³-X⁴ does not contain any oxygen-oxygen, oxygen-nitrogen or nitrogen-nitrogen bonds;
X⁵ is —(CH₂)_{b}—, wherein b is an integer between 0 and 6;
X⁶ is hydrogen, C₁-C₆ alkyl, 5- to 6-membered heteroaryl optionally substituted with 1 or 2 C₁-C₆ alkyl groups, or —NR⁴R⁵, wherein R⁴ and R⁵ are each independently hydrogen or C₁-C₆ alkyl; or alternatively R⁴ and R⁵ join together with the nitrogen to which they are bound to form a 4- to 7-membered heterocyclyl optionally substituted with 1 or 2 C₁-C₆ alkyl groups, wherein the heterocyclyl optionally includes an additional heteroatom selected from oxygen, sulfur, and nitrogen;
each X⁷ is independently hydrogen, hydroxyl or —NR⁶R⁷, wherein R⁶ and R⁷ are each independently hydrogen or C₁-C₆ alkyl; or alternatively R⁶ and R⁷ join together with the nitrogen to which they are bound to form a 4- to 7-membered heterocyclyl optionally substituted with 1 or 2 C₁-C₆ alkyl groups, wherein the heterocyclyl optionally includes an additional heteroatom selected from oxygen, sulfur, and nitrogen;
at least one of X¹, X², X³, X⁴, and X⁵ is present;
A¹ and A² are each independently selected from the group consisting of: C₅-C₁₂ haloalkyl, C₅-C₁₂ alkenyl, C₅-C₁₂ alkynyl, (C₅-C₁₂ alkoxy)-(CH₂)ₙ₂—, (C₅-C₁₀ aryl)-(CH₂)ₙ₃-optionally ring substituted with one or two halo, C₁-C₆ alkyl, C₁-C₆ haloalkyl, or C₁-C₆ alkoxy groups, and (C₃-C₈ cycloalkyl)-(CH₂)ₙ₄-optionally ring substituted with 1 or 2 C₁-C₆ alkyl groups; or alternatively A¹ and A² join together with the atoms to which they are bound to form a 5- to 6-membered cyclic acetal substituted with 1 or 2 C₄-C₁₀ alkyl groups;
n1, n2 and n3 are each individually an integer between 1 and 4; and
n4 is an integer between zero and 4;
B) an amino lipid of Formula (Ib): [chemical structure]
wherein:
R¹ is C₉-C₂₀ alkyl or C₉-C₂₀ alkenyl with 1-3 units of unsaturation;
X¹ and X² are each independently absent or selected from —O—, NR², and [chemical structure]
wherein R² is C₁-C₆ alkyl, and wherein X¹ and X² are not both —O— or NR²;
a is an integer between 1 and 6;
X³ and X⁴ are each independently absent or selected from the group consisting of: 4- to 7-membered heterocyclyl optionally substituted with 1 or 2 C₁-C₆ alkyl groups, 5- to 6-membered heteroaryl optionally substituted with 1 or 2 C₁-C₆ alkyl groups, and —NR³—, wherein each R³ is a hydrogen atom or C₁-C₆ alkyl;
X⁵ is —(CH₂)_{b}—, wherein b is an integer between 0 and 6;
X⁶ is hydrogen, C₁-C₆ alkyl, 5- to 6-membered heteroaryl optionally substituted with 1 or 2 C₁-C₆ alkyl groups, or —NR⁴R⁵, wherein R⁴ and R⁵ are each independently hydrogen or C₁-C₆ alkyl; or alternatively R⁴ and R⁵ join together with the nitrogen to which they are bound to form a 4- to 7-membered heterocyclyl optionally substituted with 1 or 2 C₁-C₆ alkyl groups, wherein the heterocyclyl optionally includes an additional heteroatom selected from oxygen, sulfur, and nitrogen;
X⁷ is hydrogen or —NR⁶R⁷, wherein R⁶ and R⁷ are each independently hydrogen or C₁-C₆ alkyl; or alternatively R⁶ and R⁷ join together with the nitrogen to which they are bound to form a 4- to 7-membered heterocyclyl optionally substituted with 1 or 2 C₁-C₆ alkyl groups, wherein the heterocyclyl optionally includes an additional heteroatom selected from oxygen, sulfur, and nitrogen;
at least one of X¹, X², X³, X⁴, and X⁵ is present; and
provided that when either X¹ or X² is —O—, neither X³ nor X⁴ is [chemical structure]
and when either X¹ or X² is —O—, R⁴ and R⁵ are not both ethyl;
C) an amino lipid of Formula (Ic): [chemical structure]
or its N-oxide, or a salt thereof, wherein
L1 is C₁-6 alkylenyl, or C₂-6 heteroalkylenyl;
each L² is independently C₂-10 alkylenyl, or C₃-10 heteroalkylenyl;
L is absent, C₁-10 alkylenyl, or C₂-10 heteroalkylenyl;
L³ is absent, C₁-10 alkylenyl, or C₂-10 heteroalkylenyl;
X is absent, —OC(O)—, —C(O)O—, or —OC(O)O—; [chemical structure]
each R is independently hydrogen, or an optionally substituted group selected from C₆-20 aliphatic, C₆-20 haloaliphatic, a 3- to 7-membered cycloaliphatic ring, 1-adamantyl, 2-adamantyl, sterolyl, and phenyl;
R¹ is hydrogen, a 3- to 7-membered cycloaliphatic ring, a 3- to 7-membered heterocyclic ring comprising 1-3 heteroatoms independently selected from nitrogen, oxygen, and sulfur, —OR², —C(O)OR², —C(O) SR², —OC(O)R², —OC(O)OR², —CN, —N(R²)₂, —C(O)N(R²)₂, —NR²C(O)R², —OC(O)N(R²)₂, —N(R²)C(O)OR², —NR²S(O)₂R², —NR²C(O)N(R²)₂, —NR²C(S)N(R²)₂, —NR²C(NR²)N(R²)₂, —NR²C(CHR²)N(R²)₂, —N(OR²)C(O)R², —N(OR²) S(O)₂R², —N(OR²)C(O)OR², —N(OR²)C(O)N(R²)₂, —N(OR²)C(S)N(R²)₂, —N(OR²)C(NR²)N(R²)₂, —N(OR²)C(CHR²)N(R²)₂, —C(NR²)N(R²)₂, —C(NR²)R², —C(O)N(R²)OR², —C(R²)N(R²)₂C(O)OR², [chemical structure]
—CR² (OR²)R³, [chemical structure]
each R² is independently hydrogen, —CN, —NO₂, —OR⁴, —S(O)₂R⁴, —S(O)₂N(R⁴)₂, —(CH₂) n-R⁴, or an optionally substituted group selected from C₁-6 aliphatic, a 3- to 7-membered cycloaliphatic ring, and a 3- to 7-membered heterocyclic ring comprising 1-3 heteroatoms independently selected from nitrogen, oxygen, and sulfur, or
two occurrences of R², taken together with the atom(s) to which they are attached, form an optionally substituted 4- to 7-membered heterocyclic ring comprising 0-1 additional heteroatom selected from nitrogen, oxygen, and sulfur;
each R³ is independently-(CH₂) n-R⁴, or
two occurrences of R³, taken together with the atoms to which they are attached, form an optionally substituted 5- to 6-membered heterocyclic ring comprising 0-1 additional heteroatom selected from nitrogen, oxygen, and sulfur;
each R⁴ is independently
hydrogen, —OR⁵, —N(R⁵)₂, —OC(O)R⁵, —OC(O)OR⁵, —CN, —C(O)N(R⁵)₂,
—NR⁵C(O)R⁵, —OC(O)N(R⁵)₂, —N(R⁵)C(O)OR⁵, —NR⁵S(O)₂R⁵, —NR⁵° C. (O)N(R⁵)₂, —NR⁵° C. (S)N(R⁵)₂, —NR⁵C(NR⁵)N(R⁵)₂, or [chemical structure]
each R⁵ is independently hydrogen, optionally substituted C₁₋₆ aliphatic, or
two occurrences of R⁵, taken together with the atom(s) to which they are attached, form an optionally substituted 4- to 7-membered heterocyclic ring comprising 0-1 additional heteroatom selected from nitrogen, oxygen, and sulfur;
each R⁶ is independently C₄-12 aliphatic; and
n is 0 to 4;
D) an amino lipid of Formula (Id): [chemical structure]
or its N-oxide, or a pharmaceutically acceptable salt thereof, wherein
L¹ is absent, C₁-6 alkylenyl, or C₂-6 heteroalkylenyl;
each L² is independently optionally substituted C₂₋₁₅ alkylenyl, or optionally substituted C₃₋₁₅ heteroalkylenyl;
L³ is absent, optionally substituted C₁₋₁₀ alkylenyl, or optionally substituted C₂₋₁₀ heteroalkylenyl;
X is absent, —OC(O)—, —C(O)O—, or —OC(O)O—;
each R′ is independently an optionally substituted group selected from C₄-12 aliphatic, 3- to 12-membered cycloaliphatic, 7- to 12-membered bridged bicyclic comprising 0-4 heteroatoms independently selected from nitrogen, oxygen, or sulfur, 1-adamantyl, 2-adamantyl, sterolyl, and phenyl;
R is hydrogen, [chemical structure]
or an optionally substituted group selected from C₆-20 aliphatic, 3- to 12-membered cycloaliphatic, 7- to 12-membered bridged bicyclic comprising 0-4 heteroatoms independently selected from nitrogen, oxygen, or sulfur, 1-adamantyl, 2-adamantyl, sterolyl, and phenyl;
R¹ is hydrogen, optionally substituted phenyl, optionally substituted 3- to 7-membered cycloaliphatic, optionally substituted 3- to 7-membered heterocyclyl comprising 1-3 heteroatoms independently selected from nitrogen, oxygen, and sulfur, optionally substituted 5- to 6-membered monocyclic heteroaryl comprising 1-4 heteroatoms independently selected from nitrogen, oxygen, and sulfur, optionally substituted 8- to 10-membered bicyclic heteroaryl comprising 1-4 heteroatoms independently selected from nitrogen, oxygen, and sulfur, —OR², —C(O)OR², —C(O) SR², —OC(O)R², —OC(O)OR², —CN, —N(R²)₂, —C(O)N(R²)₂, —S(O)₂N(R²)₂, —NR²C(O)R², —OC(O)N(R²)₂, —N(R²)C(O)OR², —NR²S(O)₂R², —NR²C(O)N(R²)₂, —NR²C(S)N(R²)₂, —NR²C(NR²)N(R²)₂, —NR²C(CHR²)N(R²)₂, —N(OR²)C(O)R², —N(OR²) S(O)₂R², —N(OR²)C(O)OR², —N(OR²)C(O)N(R²)₂,
—N(OR²)C(S)N(R²)₂, —N(OR²)C(NR²)N(R²)₂, —N(OR²)C(CHR²)N(R²)₂, —C(NR²)N(R²)₂, —C(NR²)R², —C(O)N(R²)OR², —C(R²)N(R²)₂C(O)OR², —CR² (R³)₂, —OP(O) (OR²)₂, or —P(O)(OR²)₂; or
R¹ is [chemical structure]
or a ring selected from 3- to 7-membered cycloaliphatic and 3- to 7-membered heterocyclyl comprising 1-3 heteroatoms independently selected from nitrogen, oxygen, and sulfur, wherein the cycloaliphatic or heterocyclyl ring is optionally substituted with 1-4 R² or R³ groups;
each R² is independently hydrogen, oxo, —CN, —NO₂, —OR⁴, —S(O)₂R⁴, —S(O)₂N(R⁴)₂, —(CH₂) n-R⁴, or an optionally substituted group selected from C₁-6 aliphatic, phenyl, 3- to 7-membered cycloaliphatic, 5- to 6-membered monocyclic heteroaryl comprising 1-4 heteroatoms independently selected from nitrogen, oxygen, and sulfur, and 3- to 7-membered heterocyclyl comprising 1-3 heteroatoms independently selected from nitrogen, oxygen, and sulfur; or
two occurrences of R², taken together with the atom(s) to which they are attached, form optionally substituted 4- to 7-membered heterocyclyl comprising 0-1 additional heteroatom selected from nitrogen, oxygen, and sulfur;
each R³ is independently —(CH₂)ₙ—R⁴; or
two occurrences of R³, taken together with the atom(s) to which they are attached, form optionally substituted 5- to 6-membered heterocyclyl comprising 0-1 additional heteroatom selected from nitrogen, oxygen, and sulfur;
each R⁴ is independently hydrogen, —OR⁵, —N(R⁵)₂, —OC(O)R⁵, —OC(O)OR⁵, —CN, —C(O)N(R⁵)₂,
—NR⁵C(O)R⁵, —OC(O)N(R⁵)₂, —N(R⁵)C(O)OR⁵, —NR⁵S(O)₂R⁵, —NR⁵° C. (O)N(R⁵)₂, —NR⁵C(S)N(R⁵)₂, —NR⁵° C. (NR⁵)N(R⁵)₂, or [chemical structure]
each R⁵ is independently hydrogen, or optionally substituted C₁₋₆ aliphatic; or
two occurrences of R⁵, taken together with the atom(s) to which they are attached, form optionally substituted 4- to 7-membered heterocyclyl comprising 0-1 additional heteroatom selected from nitrogen, oxygen, and sulfur;
each R⁶ is independently C₄-12 aliphatic; and
each n is independently 0 to 4;
E) an amino lipid of Formula (Ie): [chemical structure]
or a pharmaceutically acceptable salt thereof, wherein:
L¹ is a covalent bond, —C(O)—, or —OC(O)—;
L² is a covalent bond, an optionally substituted bivalent saturated or unsaturated, straight or branched C₁-C₁₂ hydrocarbon chain, or [chemical structure]
Cy^{A} is an optionally substituted ring selected from phenylene and 3- to 7-membered saturated or partially unsaturated carbocyclene;
each m is independently 0, 1, or 2;
L³ is a covalent bond, —C(O)—, —C(O)O—, —OC(O)—, —O—, or —OC(O)O—;
R¹ is [chemical structure]
or an optionally substituted saturated or unsaturated, straight or branched C₁-C₂₀ hydrocarbon chain wherein 1-3 methylene units are optionally and independently replaced with —O— or —NR—;
Cy^{B} is an optionally substituted ring selected from 3- to 12-membered saturated or partially unsaturated carbocyclyl, 1-adamantyl, 2-adamantyl, [chemical structure]
sterolyl, and phenyl;
p is 0, 1, 2, or 3;
X¹ is a covalent bond, —O—, or —NR—;
X² is a covalent bond or an optionally substituted, bivalent saturated or unsaturated, straight or branched, C₁-C₁₂ hydrocarbon chain, wherein 1-3 methylene units are optionally and independently replaced with —O—, —NR—, or —Cy^{C}—;
Cy^{C} is an optionally substituted ring selected from 3- to 7-membered saturated or partially unsaturated carbocyclene, phenylene, 3- to 7-membered saturated or partially unsaturated heterocyclene having 1-3 heteroatoms independently selected from nitrogen, oxygen, and sulfur, and 5- to 6-membered heteroarylene having 1-3 heteroatoms independently selected from nitrogen, oxygen, and sulfur;
X³ is hydrogen or an optionally substituted ring selected from 3- to 7-membered saturated or partially unsaturated carbocyclyl, phenyl, 3- to 7-membered saturated or partially unsaturated heterocyclyl having 1-3 heteroatoms independently selected from nitrogen, oxygen, and sulfur, or 5- to 6-membered heteroaryl having 1-3 heteroatoms independently selected from nitrogen, oxygen, and sulfur;
each R is independently hydrogen or an optionally substituted C₁-C₆ aliphatic group;
Z¹ is a covalent bond or —O—;
Z² is an optionally substituted group selected from 4- to 12-membered saturated or partially unsaturated carbocyclyl, phenyl, 1-adamantyl, and 2-adamantyl;
Z³ is hydrogen, or an optionally substituted group selected from C₁-C₁₀ aliphatic, and 4- to 12-membered saturated or partially unsaturated carbocyclyl; and
d is 0, 1, 2, 3, 4, 5, or 6; provided that when L³ is a covalent bond, then R¹ must be [chemical structure]
F) an amino lipid of Formula (If): [chemical structure]
or a pharmaceutically acceptable salt thereof, wherein:
each L¹ and L^{1′} is independently-C(O)— or —C(O)O—;
each L² and L^{2′} is independently a covalent bond, an optionally substituted bivalent saturated or unsaturated, straight or branched C₁-C₁₂ hydrocarbon chain, or [chemical structure]
each Cy^{A} is independently an optionally substituted ring selected from phenylene or a 3- to 7-membered saturated or partially unsaturated carbocyclene;
each m is independently 0, 1, or 2;
each L³ and L^{3′} is independently a covalent bond, —C(O)O—, —OC(O)—, —O—, or —OC(O)O—;
each R¹ and R^{1′} is independently an optionally substituted group selected from a saturated or unsaturated, straight or branched C₁-C₂₀ hydrocarbon chain, wherein 1-3 methylene units are optionally and independently replaced with —O— or —NR—, a 3- to 12-membered saturated or partially unsaturated carbocyclic ring, 1-adamantyl, 2-adamantyl, sterolyl, phenyl, and [chemical structure]
each L⁴ is independently a bivalent saturated or unsaturated, straight or branched C₁-C₆ hydrocarbon chain;
each A¹ and A² is independently an optionally substituted C₁-C₂₀ aliphatic or —L⁵-R⁵;
or A¹ and A², together with their intervening atoms, may form an optionally substituted ring: [chemical structure]
where
x is selected from 1 or 2; and
#represents the point of attachment to L⁴;
each L⁵ is independently a bivalent saturated or unsaturated, straight or branched C₁-C₂₀ hydrocarbon chain, wherein 1-3 methylene units are optionally and independently replaced with —O— or —NR—;
each R⁵ is independently an optionally substituted group selected from a 5- to 10-membered aryl ring and a 3- to 8-membered carbocyclic ring;
X¹ is a covalent bond, —O—, or —NR—;
X² is a covalent bond or an optionally substituted, bivalent saturated or unsaturated, straight or branched, C₁-C₁₂ hydrocarbon chain, wherein 1-3 methylene units are optionally and independently replaced with —O— or —NR—;
X³ is hydrogen or —Cy^{B};
Cy^{B} is an optionally substituted ring selected from 3- to 7-membered saturated or partially unsaturated carbocyclyl, phenyl, 3- to 7-membered saturated or partially unsaturated heterocyclyl having 1-3 heteroatoms independently selected from nitrogen, oxygen, and sulfur, and 5- to 6-membered heteroaryl having 1-3 heteroatoms independently selected from nitrogen, oxygen, and sulfur; and
each R is independently hydrogen or an optionally substituted C₁-C₆ aliphatic group;
provided that when X³ is hydrogen, at least one of R¹ or R^{1′} is [chemical structure]
or
G) an amino lipid of Formula (Ig): [chemical structure]
or a pharmaceutically acceptable salt thereof, wherein:
each of L¹ and L^{1′} is independently a covalent bond, —C(O)—, or —OC(O)—;
each of L² and L^{2′} is independently a covalent bond, an optionally substituted bivalent saturated or unsaturated, straight or branched C₁-C₁₂ hydrocarbon chain, or [chemical structure]
each Cy^{A} is independently an optionally substituted ring selected from phenylene or 3- to 7-membered saturated or partially unsaturated carbocyclene;
each m is independently 0, 1, or 2;
each of L³ and L^{3′} is independently a covalent bond, —O—, —C(O)O—, —OC(O)—, or —OC(O)O—;
each of R¹ and R^{1′} is independently an optionally substituted group selected from saturated or unsaturated, straight or branched C₁-C₂₀ hydrocarbon chain wherein 1-3 methylene units are optionally and independently replaced with —O— or —NR—, a 3- to 7-membered saturated or partially unsaturated carbocyclic ring, 1-adamantyl, 2-adamantyl, sterolyl, phenyl, or [chemical structure]
each L⁴ is independently a bivalent saturated or unsaturated, straight or branched C₁-C₂₀ hydrocarbon chain;
each A¹ and A² is independently an optionally substituted C₁-C₂₀ aliphatic or —L⁵-R⁵,
or A¹ and A², together with their intervening atoms, may form an optionally substituted ring: [chemical structure]
wherein
x is selected from 1 or 2; and
#represents the point of attachment to L⁴;
each L⁵ is independently a bivalent saturated or unsaturated, straight or branched C₁-C₂₀ hydrocarbon chain, wherein 1-3 methylene units are optionally and independently replaced with —O— or —NR—;
each R⁵ is independently an optionally substituted group selected from a 6- to 10-membered aryl ring or a 3- to 8-membered carbocyclic ring;
Y¹ is a covalent bond, —C(O)—, or —C(O)O—;
Y² is a bivalent saturated or unsaturated, straight or branched C₁-C₆ hydrocarbon chain, wherein 1-2 methylene units are optionally and independently replaced with cyclopropylene, —O—, or —NR—;
Y³ is an optionally substituted group selected from saturated or unsaturated, straight or branched C₁-C₁₄ hydrocarbon chain, wherein 1-3 methylene units are optionally and independently replaced with —O— or —NR—, a 3- to 7-membered saturated or partially unsaturated carbocyclic ring, 1-adamantyl, 2-adamantyl, or phenyl;
X¹ is a covalent bond, —O—, or —NR—;
X² is an optionally substituted bivalent saturated or unsaturated, straight or branched C₁-C₁₂ hydrocarbon chain, wherein 1-3 methylene units are optionally and independently replaced with —O—, —NR—, or —Cy^{B}—;
each Cy^{B} is independently an optionally substituted ring selected from 3- to 7-membered saturated or partially unsaturated carbocyclene, phenylene, 3- to 7-membered heterocyclene having 1-3 heteroatoms independently selected from nitrogen, oxygen, and sulfur, or 5- to 6-membered heteroarylene having 1-3 heteroatoms independently selected from nitrogen, oxygen, and sulfur;
X³ is hydrogen or an optionally substituted ring selected from 3- to 7-membered saturated or partially unsaturated carbocyclyl, phenyl, 3- to 7-membered heterocyclyl having 1-3 heteroatoms independently selected from nitrogen, oxygen, and sulfur, or 5- to 6-membered heteroaryl having 1-3 heteroatoms independently selected from nitrogen, oxygen, and sulfur; and
each R is independently hydrogen or an optionally substituted C₁-C₆ aliphatic group.

2. The LNP of claim 1, wherein the amino lipid is a compound of Formula A′: [chemical structure]
or its N-oxide, or a pharmaceutically acceptable salt thereof, wherein
L¹ is absent, C₁-6 alkylenyl, or C₂-6 heteroalkylenyl;
each L² is independently optionally substituted C₂₋₁₅ alkylenyl, or optionally substituted C₃₋₁₅ heteroalkylenyl;
L is C₁-10 alkylenyl, or C₂-10 heteroalkylenyl;
X² is —OC(O)—, —C(O)O—, or —OC(O)O—;
X is absent, —OC(O)—, —C(O)O—, or —OC(O)O—;
R″ is hydrogen, [chemical structure]
or an optionally substituted group selected from C₆-20 aliphatic, 3- to 12-membered cycloaliphatic, 7- to 12-membered bridged bicyclic comprising 0-4 heteroatoms independently selected from nitrogen, oxygen, or sulfur, 1-adamantyl, 2-adamantyl, sterolyl, and phenyl;
each of R and R^{a} is independently hydrogen, or an optionally substituted group selected from C₆-20 aliphatic, 3- to 12-membered cycloaliphatic, 7- to 12-membered bridged bicyclic comprising 0-4 heteroatoms independently selected from nitrogen, oxygen, or sulfur, 1-adamantyl, 2-adamantyl, sterolyl, and phenyl
each of L³ and L^{3a} is independently absent, optionally substituted C₁₋₁₀ alkylenyl, or optionally substituted C₂₋₁₀ heteroalkylenyl;
R¹ is hydrogen, optionally substituted phenyl, optionally substituted 3- to 7-membered cycloaliphatic, optionally substituted 3- to 7-membered heterocyclyl comprising 1-3 heteroatoms independently selected from nitrogen, oxygen, and sulfur, optionally substituted 5- to 6-membered monocyclic heteroaryl comprising 1-4 heteroatoms independently selected from nitrogen, oxygen, and sulfur, optionally substituted 8- to 10-membered bicyclic heteroaryl comprising 1-4 heteroatoms independently selected from nitrogen, oxygen, and sulfur, —OR², —C(O)OR², —C(O) SR², —OC(O)R², —OC(O)OR², —CN, —N(R²)₂, —C(O)N(R²)₂, —S(O)₂N(R²)₂, —NR²C(O)R², —OC(O)N(R²)₂, —N(R²)C(O)OR², —NR²S(O)₂R², —NR²C(O)N(R²)₂, —NR²C(S)N(R²)₂, —NR²C(NR²)N(R²)₂, —NR²C(CHR²)N(R²)₂, —N(OR²)C(O)R², —N(OR²) S(O)₂R², —N(OR²)C(O)OR², —N(OR²)C(O)N(R²)₂,
—N(OR²)C(S)N(R²)₂, —N(OR²)C(NR²)N(R²)₂, —N(OR²)C(CHR²)N(R²)₂, —C(NR²)N(R²)₂, —C(NR²)R², —C(O)N(R²)OR², —C(R²)N(R²)₂C(O)OR², —CR² (R³)₂, —OP(O) (OR²)₂, or —P(O) (OR²)₂; or
R¹ is [chemical structure]
or a ring selected from 3- to 7-membered cycloaliphatic and 3- to 7-membered heterocyclyl comprising 1-3 heteroatoms independently selected from nitrogen, oxygen, and sulfur, wherein the cycloaliphatic or heterocyclyl ring is optionally substituted with 1-4 R² or R³ groups;
each R² is independently hydrogen, oxo, —CN, —NO₂, —OR⁴, —S(O)₂R⁴, —S(O)₂N(R⁴)₂, —(CH₂) n-R⁴, or an optionally substituted group selected from C₁-6 aliphatic, phenyl, 3- to 7-membered cycloaliphatic, 5- to 6-membered monocyclic heteroaryl comprising 1-4 heteroatoms independently selected from nitrogen, oxygen, and sulfur, and 3- to 7-membered heterocyclyl comprising 1-3 heteroatoms independently selected from nitrogen, oxygen, and sulfur; or
two occurrences of R², taken together with the atom(s) to which they are attached, form optionally substituted 4- to 7-membered heterocyclyl comprising 0-1 additional heteroatom selected from nitrogen, oxygen, and sulfur;
each R³ is independently-(CH₂) n-R⁴; or
two occurrences of R³, taken together with the atom(s) to which they are attached, form optionally substituted 5- to 6-membered heterocyclyl comprising 0-1 additional heteroatom selected from nitrogen, oxygen, and sulfur;
each R⁴ is independently hydrogen, —OR⁵, —N(R⁵)₂, —OC(O)R⁵, —OC(O)OR⁵, —CN, —C(O)N(R⁵)₂,
—NR⁵C(O)R⁵, —OC(O)N(R⁵)₂, —N(R⁵)C(O)OR⁵, —NR⁵S(O)₂R⁵, —NR⁵C(O)N(R⁵)₂, —NR⁵C(S)N(R⁵)₂, —NR⁵C(NR⁵)N(R⁵)₂, or [chemical structure]
each R⁵ is independently hydrogen, or optionally substituted C₁₋₆ aliphatic; or
two occurrences of R⁵, taken together with the atom(s) to which they are attached, form optionally substituted 4- to 7-membered heterocyclyl comprising 0-1 additional heteroatom selected from nitrogen, oxygen, and sulfur;
each R⁶ is independently C₄-12 aliphatic; and
each n is independently 0 to 4.

3. The LNP of claim 2, wherein the amino lipid is a compound of Formula III-a-i: [chemical structure]
or its N-oxide, or a pharmaceutically acceptable salt thereof,
wherein each of R, R¹, L, L¹, and L² is as defined for Formula A′ of claim 2.

4. The LNP of claim 2, wherein the amino lipid is a compound of the formula BLP8-4: [chemical structure]
or pharmaceutically acceptable salt thereof.

5. The LNP of claim 1, wherein the amino lipid is a compound of Formula I: [chemical structure]
or a pharmaceutically acceptable salt thereof, wherein:
L¹ is a covalent bond, —C(O)—, or —OC(O)—;
L² is a covalent bond, an optionally substituted bivalent saturated or unsaturated, straight or branched C₁-C₁₂ hydrocarbon chain, or [chemical structure]
Cy^{A} is an optionally substituted ring selected from phenylene and 3- to 7-membered saturated or partially unsaturated carbocyclene;
each m is independently 0, 1, or 2;
L³ is a covalent bond, —C(O)—, —C(O)O—, —OC(O)—, —O—, or —OC(O)O—;
R¹ is [chemical structure]
an optionally substituted saturated or unsaturated, straight or branched C₁-C₂₀ hydrocarbon chain wherein 1-3 methylene units are optionally and independently replaced with —O— or —NR—, or [chemical structure]
Cy^{B} is an optionally substituted ring selected from 3- to 12-membered saturated or partially unsaturated carbocyclyl, 1-adamantyl, 2-adamantyl, [chemical structure]
sterolyl, and phenyl;
p is 0, 1, 2, or 3;
each L⁴ is independently a bivalent saturated or unsaturated, straight or branched C₁-C₆ hydrocarbon chain;
each A¹ and A² is independently an optionally substituted C₁-C₂₀ aliphatic or —L⁵-R⁵;
or A¹ and A², together with their intervening atoms, may form an optionally substituted [chemical structure]
ring:
where
x is selected from 1 or 2; and
#represents the point of attachment to L⁴;
each L⁵ is independently a bivalent saturated or unsaturated, straight or branched C₁-C₂₀ hydrocarbon chain, wherein 1-3 methylene units are optionally and independently replaced with —O— or —NR—;
each R⁵ is independently an optionally substituted group selected from a 5- to 10-membered aryl ring or a 3- to 8-membered carbocyclic ring;
X¹ is a covalent bond, —O—, or —NR—;
X² is a covalent bond or an optionally substituted, bivalent saturated or unsaturated, straight or branched, C₁-C₁₂ hydrocarbon chain, wherein 1-3 methylene units are optionally and independently replaced with —O—, —NR—, or —Cy^{C}—;
Cy^{C} is an optionally substituted ring selected from 3- to 7-membered saturated or partially unsaturated carbocyclene, phenylene, 3- to 7-membered saturated or partially unsaturated heterocyclene having 1-3 heteroatoms independently selected from nitrogen, oxygen, and sulfur, and 5- to 6-membered heteroarylene having 1-3 heteroatoms independently selected from nitrogen, oxygen, and sulfur;
X³ is hydrogen or an optionally substituted ring selected from 3- to 7-membered saturated or partially unsaturated carbocyclyl, phenyl, 3- to 7-membered saturated or partially unsaturated heterocyclyl having 1-3 heteroatoms independently selected from nitrogen, oxygen, and sulfur, or 5- to 6-membered heteroaryl having 1-3 heteroatoms independently selected from nitrogen, oxygen, and sulfur; and
each R is independently hydrogen or an optionally substituted C₁-C₆ aliphatic group;
provided that when L³ is a covalent bond, then R¹ must be

[chemical structure]

6. The LNP of claim 5, wherein the amino lipid is a compound of Formula (VIA): [chemical structure]
or a pharmaceutically acceptable salt thereof,
wherein n is 1, 2, 3 or 4, and L², R¹, A¹, A², X², and X³ are as defined for Formula I of claim 3.

7. The LNP of claim 5, wherein the amino lipid is a compound of the formula BLP4-71: [chemical structure]
or a pharmaceutically acceptable salt thereof.

8. The LNP of claim 1, wherein the LNP comprises an N: P ratio of between about 1:40 to about 1:1.

9. The LNP of claim 8, wherein the LNP comprises an N: P ratio of about 1:6.

10. The LNP of claim 1, wherein the guide polynucleotide comprises a scaffold sequence selected from the following:
GUUUUAGAGCUAGAAAUAGCAAGUUAAAAUAAGGCUAGUCCGUUAUCAACUUGAAAAAGUGG CACCGAGUCGGUGCmU*mU*mU*U (SEQ ID NO: 317);
mGUUUUAGmAmGmCmUmAGmAmAmAmUmAmGmCmAmAGUUmAAmAAmUAmAmGmGmCmUmAG UmCmCGUUAmUmCAAmCmUmUGmAmAmAmAmAmGmUmGGmCmAmCmCmGmAmGmUmCmGmGm UmGmCmU*mU*mU*mU (SEQ ID NO: 317), and
mG*U*U*U*U*A*G*mA*mG*mC*mU*mA*Gm*Am*Am*Am*Um*Am*Gm*Cm*Am*A*G*U *Um*A*A*mA*A*mU*A*mA*mG*mG*mC*mU*mA*G*U*mC*mC*G*U*U*A*mU*mC*A* A*mC*mU*mU*G*mA*mA*mA*mA*mA*mG*mU*mG*G*mC*mA*mC*mC*mG*mA*mG*mU *mC*mG*mG*mU*mG*mC*mU*mU*mU*mU (SEQ ID NO: 317), wherein A is adenosine, C is cytidine, G is guanosine, U is uridine, mA is 2′-O-methyladenosine, mC is 2′-O-methylcytidine, mG is 2′-O-methylguanosine, mU is 2′-O-methyluridine, and “*” indicates a phosphorothioate (PS) backbone linkage.

11. The LNP of claim 1, wherein the guide polynucleotide comprises 2-5 contiguous 2′-O-methylated nucleobases at the 3′ end and at the 5′ end.

12. The LNP of claim 1, wherein the guide polynucleotide comprises 2-5 contiguous nucleobases at the 3′ end and at the 5′ end that comprise phosphorothioate internucleotide linkages.

13. The LNP of claim 1, further comprising a polynucleotide encoding a base editor comprising a nucleic acid programmable DNA binding protein (napDNAbp) and a deaminase domain.

14. The LNP of claim 1, further comprising a polynucleotide encoding a nuclease active nucleic acid programmable DNA binding protein (napDNAbp).

15. A pharmaceutical composition comprising the LNP of claim 1.

16. A method of treating a disease or disorder, comprising administering to a subject in need thereof, the pharmaceutical composition of claim 15.

17. The method of claim 16, wherein the disease or disorder is hereditary transthyretin amyloidosis, cardiomyopathy, polyneuropathy or senile cardiac amyloidosis.

18. The method of claim 16, wherein the pharmaceutical composition is administered by a route selected from intravenous, intradermal, transdermal, intranasal, intramuscular, subcutaneous, transmucosal or oral.

19. The method of claim 16, wherein the LNP is delivered to liver.
